United States Patent Application Publication US 2024/0026002 A1 - sequence listing, part 3

SEQ ID NO: 27733 - protein, 16 aa, synthetic construct
  REGION 1..16: note = Description of Artificial Sequence: Synthetic peptide
  REGION 1..16: note = XENP021829 vlCDR1
RSSKSLLHSNGNTYLY

SEQ ID NO: 27734 - protein, 7 aa, synthetic construct
  REGION 1..7: note = Description of Artificial Sequence: Synthetic peptide
  REGION 1..7: note = XENP021829 vlCDR2
RMSNLAS

SEQ ID NO: 27735 - protein, 9 aa, synthetic construct
  REGION 1..9: note = Description of Artificial Sequence: Synthetic peptide
  REGION 1..9: note = XENP021829 vlCDR3
MQHLEYPWT

SEQ ID NO: 27736 - protein, 454 aa, synthetic construct; identical to SEQ ID NO: 26722
  REGION 1..454: note = Description of Artificial Sequence: Synthetic polypeptide
  REGION 1..454: note = XENP021830 jMab-138[ICOS]_H0L0 _Fab-1G6_L1.194_H1.279_scFv Fab-Fc Heavy Chain

SEQ ID NO: 27737 - protein, 125 aa, synthetic construct; identical to SEQ ID NO: 26323
  REGION 1..125: note = Description of Artificial Sequence: Synthetic polypeptide
  REGION 1..125: note = VH of XENP021830

SEQ ID NO: 27738 - protein, 5 aa, synthetic construct
  REGION 1..5: note = Description of Artificial Sequence: Synthetic peptide
  REGION 1..5: note = XENP021830 vhCDR1
SYDMH

SEQ ID NO: 27739 - protein, 16 aa, synthetic construct
  REGION 1..16: note = Description of Artificial Sequence: Synthetic peptide
  REGION 1..16: note = XENP021830 vhCDR2
AIGTAGDTYYPGSVKG

SEQ ID NO: 27740 - protein, 17 aa, synthetic construct
  REGION 1..17: note = Description of Artificial Sequence: Synthetic peptide
  REGION 1..17: note = XENP021830 vhCDR3
DNRKVTHEHYYYYGMDV

SEQ ID NO: 27741 - protein, 480 aa, synthetic construct; identical to SEQ ID NO: 2870
  REGION 1..480: note = Description of Artificial Sequence: Synthetic polypeptide
  REGION 1..480: note = XENP021830 jMab-138[ICOS]_H0L0 _Fab-1G6_L1.194_H1.279_scFv scFv-Fc Heavy Chain

SEQ ID NO: 27742 - protein, 107 aa, synthetic construct; identical to SEQ ID NO: 2871
  REGION 1..107: note = Description of Artificial Sequence: Synthetic polypeptide
  REGION 1..107: note = VH of XENP021830

SEQ ID NO: 27743 - protein, 122 aa, synthetic construct; identical to SEQ ID NO: 2872
  REGION 1..122: note = Description of Artificial Sequence: Synthetic polypeptide
  REGION 1..122: note = VL of XENP021830

SEQ ID NO: 27744 - protein, 231 aa, synthetic construct; identical to SEQ ID NO: 2397
  REGION 1..231: note = Description of Artificial Sequence: Synthetic polypeptide
  REGION 1..231: note = Fc chain of XENP021830

SEQ ID NO: 27745 - protein, 11 aa, synthetic construct
  REGION 1..11: note = Description of Artificial Sequence: Synthetic peptide
  REGION 1..11: note = XENP021830 vhCDR1
RASQSVGNDVA

SEQ ID NO: 27746 - protein, 7 aa, synthetic construct
  REGION 1..7: note = Description of Artificial Sequence: Synthetic peptide
  REGION 1..7: note = XENP021830 vhCDR2
YASHRYT

SEQ ID NO: 27747 - protein, 9 aa, synthetic construct
  REGION 1..9: note = Description of Artificial Sequence: Synthetic peptide
  REGION 1..9: note = XENP021830 vhCDR3
QQDFSSPRT

SEQ ID NO: 27748 - protein, 5 aa, synthetic construct
  REGION 1..5: note = Description of Artificial Sequence: Synthetic peptide
  REGION 1..5: note = XENP021830 vlCDR1
NYWMN

SEQ ID NO: 27749 - protein, 19 aa, synthetic construct
  REGION 1..19: note = Description of Artificial Sequence: Synthetic peptide
  REGION 1..19: note = XENP021830 vlCDR2
EIRLYSNNYATHYAESVKG

SEQ ID NO: 27750 - protein, 11 aa, synthetic construct
  REGION 1..11: note = Description of Artificial Sequence: Synthetic peptide
  REGION 1..11: note = XENP021830 vlCDR3
YYGNYGGYFDV

SEQ ID NO: 27751 - protein, 216 aa, synthetic construct; identical to SEQ ID NO: 26327
  REGION 1..216: note = Description of Artificial Sequence: Synthetic polypeptide
  REGION 1..216: note = XENP021830 jMab-138[ICOS]_H0L0 _Fab-1G6_L1.194_H1.279_scFv Light Chain

SEQ ID NO: 27752 - protein, 109 aa, synthetic construct; identical to SEQ ID NO: 26328
  REGION 1..109: note = Description of Artificial Sequence: Synthetic polypeptide
  REGION 1..109: note = VL of XENP021830

SEQ ID NO: 27753 - protein, 12 aa, synthetic construct
  REGION 1..12: note = Description of Artificial Sequence: Synthetic peptide
  REGION 1..12: note = XENP021830 vlCDR1
RASQNIRSSYLA

SEQ ID NO: 27754 - protein, 7 aa, synthetic construct
  REGION 1..7: note = Description of Artificial Sequence: Synthetic peptide
  REGION 1..7: note = XENP021830 vlCDR2
GASSRAT

SEQ ID NO: 27755 - protein, 10 aa, synthetic construct
  REGION 1..10: note = Description of Artificial Sequence: Synthetic peptide
  REGION 1..10: note = XENP021830 vlCDR3
QQFGSSPMCS

SEQ ID NO: 27756 - protein, 454 aa, synthetic construct; identical to SEQ ID NO: 26742
  REGION 1..454: note = Description of Artificial Sequence: Synthetic polypeptide
  REGION 1..454: note = XENP021831 jMab-139[ICOS]_H0L0 _Fab-1G6_L1.194_H1.279_scFv Fab-Fc Heavy Chain

SEQ ID NO: 27757 - protein, 125 aa, synthetic construct; identical to SEQ ID NO: 26333
  REGION 1..125: note = Description of Artificial Sequence: Synthetic polypeptide
  REGION 1..125: note = VH of XENP021831

SEQ ID NO: 27758 - protein, 5 aa, synthetic construct
  REGION 1..5: note = Description of Artificial Sequence: Synthetic peptide
  REGION 1..5: note = XENP021831 vhCDR1
SYDMH

SEQ ID NO: 27759 - protein, 16 aa, synthetic construct
  REGION 1..16: note = Description of Artificial Sequence: Synthetic peptide
  REGION 1..16: note = XENP021831 vhCDR2
AIGTAGDTYYPGSVKG

SEQ ID NO: 27760 - protein, 17 aa, synthetic construct
  REGION 1..17: note = Description of Artificial Sequence: Synthetic peptide
  REGION 1..17: note = XENP021831 vhCDR3
DKRTVTHEHYYYYGMDV

SEQ ID NO: 27761 - protein, 480 aa, synthetic construct; identical to SEQ ID NO: 2870
  REGION 1..480: note = Description of Artificial Sequence: Synthetic polypeptide
  REGION 1..480: note = XENP021831 jMab-139[ICOS]_H0L0 _Fab-1G6_L1.194_H1.279_scFv scFv-Fc Heavy Chain

SEQ ID NO: 27762 - protein, 107 aa, synthetic construct; identical to SEQ ID NO: 2871
  REGION 1..107: note = Description of Artificial Sequence: Synthetic polypeptide
  REGION 1..107: note = VH of XENP021831

SEQ ID NO: 27763 - protein, 122 aa, synthetic construct; identical to SEQ ID NO: 2872
  REGION 1..122: note = Description of Artificial Sequence: Synthetic polypeptide
  REGION 1..122: note = VL of XENP021831

SEQ ID NO: 27764 - protein, 231 aa, synthetic construct; identical to SEQ ID NO: 2397
  REGION 1..231: note = Description of Artificial Sequence: Synthetic polypeptide
  REGION 1..231: note = Fc chain of XENP021831

SEQ ID NO: 27765 - protein, 11 aa, synthetic construct
  REGION 1..11: note = Description of Artificial Sequence: Synthetic peptide
  REGION 1..11: note = XENP021831 vhCDR1
RASQSVGNDVA

SEQ ID NO: 27766 - protein, 7 aa, synthetic construct
  REGION 1..7: note = Description of Artificial Sequence: Synthetic peptide
  REGION 1..7: note = XENP021831 vhCDR2
YASHRYT

SEQ ID NO: 27767 - protein, 9 aa, synthetic construct
  REGION 1..9: note = Description of Artificial Sequence: Synthetic peptide
  REGION 1..9: note = XENP021831 vhCDR3
QQDFSSPRT

SEQ ID NO: 27768 - protein, 5 aa, synthetic construct
  REGION 1..5: note = Description of Artificial Sequence: Synthetic peptide
  REGION 1..5: note = XENP021831 vlCDR1
NYWMN

SEQ ID NO: 27769 - protein, 19 aa, synthetic construct
  REGION 1..19: note = Description of Artificial Sequence: Synthetic peptide
  REGION 1..19: note = XENP021831 vlCDR2
EIRLYSNNYATHYAESVKG

SEQ ID NO: 27770 - protein, 11 aa, synthetic construct
  REGION 1..11: note = Description of Artificial Sequence: Synthetic peptide
  REGION 1..11: note = XENP021831 vlCDR3
YYGNYGGYFDV

SEQ ID NO: 27771 - protein, 216 aa, synthetic construct; identical to SEQ ID NO: 26337
  REGION 1..216: note = Description of Artificial Sequence: Synthetic polypeptide
  REGION 1..216: note = XENP021831 jMab-139[ICOS]_H0L0 _Fab-1G6_L1.194_H1.279_scFv Light Chain

SEQ ID NO: 27772 - protein, 109 aa, synthetic construct; identical to SEQ ID NO: 26338
  REGION 1..109: note = Description of Artificial Sequence: Synthetic polypeptide
  REGION 1..109: note = VL of XENP021831

SEQ ID NO: 27773 - protein, 12 aa, synthetic construct
  REGION 1..12: note = Description of Artificial Sequence: Synthetic peptide
  REGION 1..12: note = XENP021831 vlCDR1
RASQSISSSSLA

SEQ ID NO: 27774 - protein, 7 aa, synthetic construct
  REGION 1..7: note = Description of Artificial Sequence: Synthetic peptide
  REGION 1..7: note = XENP021831 vlCDR2
GASSRAT

SEQ ID NO: 27775 - protein, 10 aa, synthetic construct
  REGION 1..10: note = Description of Artificial Sequence: Synthetic peptide
  REGION 1..10: note = XENP021831 vlCDR3
QQFGSSPMCS

SEQ ID NO: 27776 - protein, 450 aa, synthetic construct; identical to SEQ ID NO: 26762
  REGION 1..450: note = Description of Artificial Sequence: Synthetic polypeptide
  REGION 1..450: note = XENP022348 WO2016059602_GSK_H0L0 _Fab-1G6_L1.194_H1.279_scFv Fab-Fc Heavy Chain

SEQ ID NO: 27777 - protein, 121 aa, synthetic construct; identical to SEQ ID NO: 26343
  REGION 1..121: note = Description of Artificial Sequence: Synthetic polypeptide
  REGION 1..121: note = VH of XENP022348

SEQ ID NO: 27778 - protein, 5 aa, synthetic construct
  REGION 1..5: note = Description of Artificial Sequence: Synthetic peptide
  REGION 1..5: note = XENP022348 vhCDR1
DYAMH

SEQ ID NO: 27779 - protein, 17 aa, synthetic construct
  REGION 1..17: note = Description of Artificial Sequence: Synthetic peptide
  REGION 1..17: note = XENP022348 vhCDR2
LISIYSDHTNYNQKFQG

SEQ ID NO: 27780 - protein, 12 aa, synthetic construct
  REGION 1..12: note = Description of Artificial Sequence: Synthetic peptide
  REGION 1..12: note = XENP022348 vhCDR3
NNYGNYGWYFDV

SEQ ID NO: 27781 - protein, 480 aa, synthetic construct; identical to SEQ ID NO: 2870
  REGION 1..480: note = Description of Artificial Sequence: Synthetic polypeptide
  REGION 1..480: note = XENP022348 WO2016059602_GSK_H0L0 _Fab-1G6_L1.194_H1.279_scFv scFv-Fc Heavy Chain

SEQ ID NO: 27782 - protein, 107 aa, synthetic construct; identical to SEQ ID NO: 2871
  REGION 1..107: note = Description of Artificial Sequence: Synthetic polypeptide
  REGION 1..107: note = VH of XENP022348

SEQ ID NO: 27783 - protein, 122 aa, synthetic construct; identical to SEQ ID NO: 2872
  REGION 1..122: note = Description of Artificial Sequence: Synthetic polypeptide
  REGION 1..122: note = VL of XENP022348

SEQ ID NO: 27784 - protein, 231 aa, synthetic construct; identical to SEQ ID NO: 2397
  REGION 1..231: note = Description of Artificial Sequence: Synthetic polypeptide
  REGION 1..231: note = Fc chain of XENP022348

SEQ ID NO: 27785 - protein, 11 aa, synthetic construct
  REGION 1..11: note = Description of Artificial Sequence: Synthetic peptide
  REGION 1..11: note = XENP022348 vhCDR1
RASQSVGNDVA

SEQ ID NO: 27786 - protein, 7 aa, synthetic construct
  REGION 1..7: note = Description of Artificial Sequence: Synthetic peptide
  REGION 1..7: note = XENP022348 vhCDR2
YASHRYT

SEQ ID NO: 27787 - protein, 9 aa, synthetic construct
  REGION 1..9: note = Description of Artificial Sequence: Synthetic peptide
  REGION 1..9: note = XENP022348 vhCDR3
QQDFSSPRT

SEQ ID NO: 27788 - protein, 5 aa, synthetic construct
  REGION 1..5: note = Description of Artificial Sequence: Synthetic peptide
  REGION 1..5: note = XENP022348 vlCDR1
NYWMN

SEQ ID NO: 27789 - protein, 19 aa, synthetic construct
  REGION 1..19: note = Description of Artificial Sequence: Synthetic peptide
  REGION 1..19: note = XENP022348 vlCDR2
EIRLYSNNYATHYAESVKG

SEQ ID NO: 27790 - protein, 11 aa, synthetic construct
  REGION 1..11: note = Description of Artificial Sequence: Synthetic peptide
  REGION 1..11: note = XENP022348 vlCDR3
YYGNYGGYFDV

SEQ ID NO: 27791 - protein, 213 aa, synthetic construct; identical to SEQ ID NO: 26347
  REGION 1..213: note = Description of Artificial Sequence: Synthetic polypeptide
  REGION 1..213: note = XENP022348 WO2016059602_GSK_H0L0 _Fab-1G6_L1.194_H1.279_scFv Light Chain

SEQ ID NO: 27792 - protein, 106 aa, synthetic construct; identical to SEQ ID NO: 26348
  REGION 1..106: note = Description of Artificial Sequence: Synthetic polypeptide
  REGION 1..106: note = VL of XENP022348

SEQ ID NO: 27793 - protein, 10 aa, synthetic construct
  REGION 1..10: note = Description of Artificial Sequence: Synthetic peptide
  REGION 1..10: note = XENP022348 vlCDR1
SASSSVSYMH

SEQ ID NO: 27794 - protein, 7 aa, synthetic construct
  REGION 1..7: note = Description of Artificial Sequence: Synthetic peptide
  REGION 1..7: note = XENP022348 vlCDR2
DTSKLAS

SEQ ID NO: 27795 - protein, 9 aa, synthetic construct
  REGION 1..9: note = Description of Artificial Sequence: Synthetic peptide
  REGION 1..9: note = XENP022348 vlCDR3
FQGSGYPYT

SEQ ID NO: 27796 - protein, 447 aa, synthetic construct; identical to SEQ ID NO: 27117
  REGION 1..447: note = Description of Artificial Sequence: Synthetic polypeptide
  REGION 1..447: note = XENP021748 YW243.55.S70[PD-L1]_H0L0 _Fab-[anti-ICOS]_H0L0 _scFv Fab-Fc Heavy Chain

SEQ ID NO: 27797 - protein, 118 aa, synthetic construct [sequence omitted]

SEQ ID NO: 27798 - protein, 5 aa, synthetic construct
  REGION 1..5: note = Description of Artificial Sequence: Synthetic peptide
  REGION 1..5: note = XENP021748 vhCDR1
DSWIH

SEQ ID NO: 27799 - protein, 17 aa, synthetic construct
  REGION 1..17: note = Description of Artificial Sequence: Synthetic peptide
  REGION 1..17: note = XENP021748 vhCDR2
WISPYGGSTYYADSVKG

SEQ ID NO: 27800 - protein, 9 aa, synthetic construct
  REGION 1..9: note = Description of Artificial Sequence: Synthetic peptide
  REGION 1..9: note = XENP021748 vhCDR3
RHWPGGFDY

SEQ ID NO: 27801 - protein, 483 aa, synthetic construct; identical to SEQ ID NO: 26827
  REGION 1..483: note = Description of Artificial Sequence: Synthetic polypeptide
  REGION 1..483: note = XENP021748 YW243.55.S70[PD-L1]_H0L0 _Fab-[anti-ICOS]_H0L0_scFv scFv-Fc Heavy Chain

SEQ ID NO: 27802 - protein, 125 aa, synthetic construct; identical to SEQ ID NO: 26293
  REGION 1..125: note = Description of Artificial Sequence: Synthetic polypeptide
  REGION 1..125: note = VH of XENP021748

SEQ ID NO: 27803 - protein, 107 aa, synthetic construct; identical to SEQ ID NO: 26298
  REGION 1..107: note = Description of Artificial Sequence: Synthetic polypeptide
  REGION 1..107: note = VL of XENP021748

SEQ ID NO: 27804 - protein, 231 aa, synthetic construct; identical to SEQ ID NO: 2397
  REGION 1..231: note = Description of Artificial Sequence: Synthetic polypeptide
  REGION 1..231: note = Fc chain of XENP021748

SEQ ID NO: 27805 - protein, 5 aa, synthetic construct
  REGION 1..5: note = Description of Artificial Sequence: Synthetic peptide
  REGION 1..5: note = XENP021748 vhCDR1
GYYMH

SEQ ID NO: 27806 - protein, 17 aa, synthetic construct
  REGION 1..17: note = Description of Artificial Sequence: Synthetic peptide
  REGION 1..17: note = XENP021748 vhCDR2
WINPHSGGTNYAQKFQG

SEQ ID NO: 27807 - protein, 16 aa, synthetic construct
  REGION 1..16: note = Description of Artificial Sequence: Synthetic peptide
  REGION 1..16: note = XENP021748 vhCDR3
TYYYDSSGYYHDAFDI

SEQ ID NO: 27808 - protein, 11 aa, synthetic construct
  REGION 1..11: note = Description of Artificial Sequence: Synthetic peptide
  REGION 1..11: note = XENP021748 vlCDR1
RASQGISRLLA

SEQ ID NO: 27809 - protein, 7 aa, synthetic construct
  REGION 1..7: note = Description of Artificial Sequence: Synthetic peptide
  REGION 1..7: note = XENP021748 vlCDR2
VASSLQS

SEQ ID NO: 27810 - protein, 9 aa, synthetic construct
  REGION 1..9: note = Description of Artificial Sequence: Synthetic peptide
  REGION 1..9: note = XENP021748 vlCDR3
QQANSFPWT

SEQ ID NO: 27811 - protein, 214 aa, synthetic construct; identical to SEQ ID NO: 27132
  REGION 1..214: note = Description of Artificial Sequence: Synthetic polypeptide
  REGION 1..214: note = XENP021748 YW243.55.S70[PD-L1]_H0L0 _Fab-[anti-ICOS]_H0L0_scFv Light Chain

SEQ ID NO: 27812 - protein, 107 aa, synthetic construct [sequence omitted]

SEQ ID NO: 27813 - protein, 11 aa, synthetic construct
  REGION 1..11: note = Description of Artificial Sequence: Synthetic peptide
  REGION 1..11: note = XENP021748 vlCDR1
RASQDVSTAVA

SEQ ID NO: 27814 - protein, 7 aa, synthetic construct
  REGION 1..7: note = Description of Artificial Sequence: Synthetic peptide
  REGION 1..7: note = XENP021748 vlCDR2
SASFLYS

SEQ ID NO: 27815 - protein, 9 aa, synthetic construct
  REGION 1..9: note = Description of Artificial Sequence: Synthetic peptide
  REGION 1..9: note = XENP021748 vlCDR3
QQYLYHPAT

SEQ ID NO: 27816 - protein, 454 aa, synthetic construct; identical to SEQ ID NO: 26442
  REGION 1..454: note = Description of Artificial Sequence: Synthetic polypeptide
  REGION 1..454: note = XENP021749 [anti-ICOS]_H0L0 _Fab-[anti-CTLA-4]_H3.23_L0.129_scFv Fab-Fc Heavy Chain

SEQ ID NO: 27817 - protein, 125 aa, synthetic construct; identical to SEQ ID NO: 26293
  REGION 1..125: note = Description of Artificial Sequence: Synthetic polypeptide
  REGION 1..125: note = VH of XENP021749

SEQ ID NO: 27818 - protein, 5 aa, synthetic construct
  REGION 1..5: note = Description of Artificial Sequence: Synthetic peptide
  REGION 1..5: note = XENP021749 vhCDR1
GYYMH

SEQ ID NO: 27819 - protein, 17 aa, synthetic construct
  REGION 1..17: note = Description of Artificial Sequence: Synthetic peptide
  REGION 1..17: note = XENP021749 vhCDR2
WINPHSGGTNYAQKFQG

SEQ ID NO: 27820 - protein, 16 aa, synthetic construct
  REGION 1..16: note = Description of Artificial Sequence: Synthetic peptide
  REGION 1..16: note = XENP021749 vhCDR3
TYYYDSSGYYHDAFDI

SEQ ID NO: 27821 - protein, 477 aa, synthetic construct; identical to SEQ ID NO: 2394
  REGION 1..477: note = Description of Artificial Sequence: Synthetic polypeptide
  REGION 1..477: note = XENP021749 [anti-ICOS]_H0L0 _Fab-[anti-CTLA-4]_H3.23_L0.129_scFv scFv-Fc Heavy Chain

SEQ ID NO: 27822 - protein, 118 aa, synthetic construct; identical to SEQ ID NO: 2395
  REGION 1..118: note = Description of Artificial Sequence: Synthetic polypeptide
  REGION 1..118: note = VH of XENP021749

SEQ ID NO: 27823 - protein, 108 aa, synthetic construct; identical to SEQ ID NO: 2396
  REGION 1..108: note = Description of Artificial Sequence: Synthetic polypeptide
  REGION 1..108: note = VL of XENP021749

SEQ ID NO: 27824 - protein, 231 aa, synthetic construct; identical to SEQ ID NO: 2397
  REGION 1..231: note = Description of Artificial Sequence: Synthetic polypeptide
  REGION 1..231: note = Fc chain of XENP021749

SEQ ID NO: 27825 - protein, 5 aa, synthetic construct
  REGION 1..5: note = Description of Artificial Sequence: Synthetic peptide
  REGION 1..5: note = XENP021749 vhCDR1
SYTMH

SEQ ID NO: 27826 - protein, 17 aa, synthetic construct
  REGION 1..17: note = Description of Artificial Sequence: Synthetic peptide
  REGION 1..17: note = XENP021749 vhCDR2
FISYDGNYKYYADSVKG

SEQ ID NO: 27827 - protein, 9 aa, synthetic construct
  REGION 1..9: note = Description of Artificial Sequence: Synthetic peptide
  REGION 1..9: note = XENP021749 vhCDR3
GGHLGPFDL

SEQ ID NO: 27828 - protein, 12 aa, synthetic construct
  REGION 1..12: note = Description of Artificial Sequence: Synthetic peptide
  REGION 1..12: note = XENP021749 vlCDR1
RASQSVGSSYLA

SEQ ID NO: 27829 - protein, 7 aa, synthetic construct
  REGION 1..7: note = Description of Artificial Sequence: Synthetic peptide
  REGION 1..7: note = XENP021749 vlCDR2
GASSRAT

SEQ ID NO: 27830 - protein, 9 aa, synthetic construct
  REGION 1..9: note = Description of Artificial Sequence: Synthetic peptide
  REGION 1..9: note = XENP021749 vlCDR3
QQYGSSPWT

SEQ ID NO: 27831 - protein, 214 aa, synthetic construct; identical to SEQ ID NO: 26297
  REGION 1..214: note = Description of Artificial Sequence: Synthetic polypeptide
  REGION 1..214: note = XENP021749 [anti-ICOS]_H0L0 _Fab-[anti-CTLA-4]_H3.23_L0.129_scFv Light Chain

SEQ ID NO: 27832 - protein, 107 aa, synthetic construct; identical to SEQ ID NO: 26298
  REGION 1..107: note = Description of Artificial Sequence: Synthetic polypeptide
  REGION 1..107: note = VL of XENP021749

SEQ ID NO: 27833 - protein, 11 aa, synthetic construct
  REGION 1..11: note = Description of Artificial Sequence: Synthetic peptide
  REGION 1..11: note = XENP021749 vlCDR1
RASQGISRLLA

SEQ ID NO: 27834 - protein, 7 aa, synthetic construct
  REGION 1..7: note = Description of Artificial Sequence: Synthetic peptide
  REGION 1..7: note = XENP021749 vlCDR2
VASSLQS

SEQ ID NO: 27835 - protein, 9 aa, synthetic construct
  REGION 1..9: note = Description of Artificial Sequence: Synthetic peptide
  REGION 1..9: note = XENP021749 vlCDR3
QQANSFPWT

SEQ ID NO: 27836 - protein, 452 aa, synthetic construct; identical to SEQ ID NO: 26682
  REGION 1..452: note = Description of Artificial Sequence: Synthetic polypeptide
  REGION 1..452: note = XENP021861 GSK_314.8[ICOS]_H0L0 one-arm mAb Fab-Fc Heavy Chain

SEQ ID NO: 27837 - protein, 123 aa, synthetic construct; identical to SEQ ID NO: 26303
  REGION 1..123: note = Description of Artificial Sequence: Synthetic polypeptide
  REGION 1..123: note = VH of XENP021861

SEQ ID NO: 27838 - protein, 5 aa, synthetic construct
  REGION 1..5: note = Description of Artificial Sequence: Synthetic peptide
  REGION 1..5: note = XENP021861 vhCDR1
TYWMH

SEQ ID NO: 27839 - protein, 17 aa, synthetic construct
  REGION 1..17: note = Description of Artificial Sequence: Synthetic peptide
  REGION 1..17: note = XENP021861 vhCDR2
EIDPSDSYVNYNQNFKG

SEQ ID NO: 27840 - protein, 14 aa, synthetic construct
  REGION 1..14: note = Description of Artificial Sequence: Synthetic peptide
  REGION 1..14: note = XENP021861 vhCDR3
SPDYYGTSLAWFDY

SEQ ID NO: 27841 - protein, 231 aa, synthetic construct; identical to SEQ ID NO: 27198
  REGION 1..231: note = Description of Artificial Sequence: Synthetic polypeptide
  REGION 1..231: note = XENP021861 GSK_314.8[ICOS]_H0L0 one-arm mAb Fc-only Heavy Chain

SEQ ID NO: 27842 - protein, 219 aa, synthetic construct; identical to SEQ ID NO: 26307
  REGION 1..219: note = Description of Artificial Sequence: Synthetic polypeptide
  REGION 1..219: note = XENP021861 GSK_314.8[ICOS]_H0L0 one-arm mAb Light Chain

SEQ ID NO: 27843 - protein, 112 aa, synthetic construct; identical to SEQ ID NO: 26308
  REGION 1..112: note = Description of Artificial Sequence: Synthetic polypeptide
  REGION 1..112: note = VL of XENP021861

SEQ ID NO: 27844 - protein, 16 aa, synthetic construct
  REGION 1..16: note = Description of Artificial Sequence: Synthetic peptide
  REGION 1..16: note = XENP021861 vlCDR1
RSSKSPLHSNGNIYLY

SEQ ID NO: 27845 - protein, 7 aa, synthetic construct
  REGION 1..7: note = Description of Artificial Sequence: Synthetic peptide
  REGION 1..7: note = XENP021861 vlCDR2
RMSNLAS

SEQ ID NO: 27846 - protein, 9 aa, synthetic construct
  REGION 1..9: note = Description of Artificial Sequence: Synthetic peptide
  REGION 1..9: note = XENP021861 vlCDR3
MQHLEYPYT

SEQ ID NO: 27847 - protein, 454 aa, synthetic construct; identical to SEQ ID NO: 26722
  REGION 1..454: note = Description of Artificial Sequence: Synthetic polypeptide
  REGION 1..454: note = XENP021863 jMab-138[ICOS]_H0L0 one-arm mAb Fab-Fc Heavy Chain

SEQ ID NO: 27848 - protein, 125 aa, synthetic construct; identical to SEQ ID NO: 26323
  REGION 1..125: note = Description of Artificial Sequence: Synthetic polypeptide
  REGION 1..125: note = VH of XENP021863

SEQ ID NO: 27849 - protein, 5 aa, synthetic construct
  REGION 1..5: note = Description of Artificial Sequence: Synthetic peptide
  REGION 1..5: note = XENP021863 vhCDR1
SYDMH

SEQ ID NO: 27850 - protein, 16 aa, synthetic construct
  REGION 1..16: note = Description of Artificial Sequence: Synthetic peptide
  REGION 1..16: note = XENP021863 vhCDR2
AIGTAGDTYYPGSVKG

SEQ ID NO: 27851 - protein, 17 aa, synthetic construct
  REGION 1..17: note = Description of Artificial Sequence: Synthetic peptide
  REGION 1..17: note = XENP021863 vhCDR3
DNRKVTHEHYYYYGMDV

SEQ ID NO: 27852 - protein, 231 aa, synthetic construct; identical to SEQ ID NO: 27198
  REGION 1..231: note = Description of Artificial Sequence: Synthetic polypeptide
  REGION 1..231: note = XENP021863 jMab-138[ICOS]_H0L0 one-arm mAb Fc-only Heavy Chain

SEQ ID NO: 27853 - protein, 216 aa, synthetic construct; identical to SEQ ID NO: 26327
  REGION 1..216: note = Description of Artificial Sequence: Synthetic polypeptide
  REGION 1..216: note = XENP021863 jMab-138[ICOS]_H0L0 one-arm mAb Light Chain

SEQ ID NO: 27854 - protein, 109 aa, synthetic construct; identical to SEQ ID NO: 26328
  REGION 1..109: note = Description of Artificial Sequence: Synthetic polypeptide
  REGION 1..109: note = VL of XENP021863

SEQ ID NO: 27855 - protein, 12 aa, synthetic construct
  REGION 1..12: note = Description of Artificial Sequence: Synthetic peptide
  REGION 1..12: note = XENP021863 vlCDR1
RASQNIRSSYLA

SEQ ID NO: 27856 - protein, 7 aa, synthetic construct
  REGION 1..7: note = Description of Artificial Sequence: Synthetic peptide
  REGION 1..7: note = XENP021863 vlCDR2
GASSRAT

SEQ ID NO: 27857 - protein, 10 aa, synthetic construct
  REGION 1..10: note = Description of Artificial Sequence: Synthetic peptide
  REGION 1..10: note = XENP021863 vlCDR3
QQFGSSPMCS

SEQ ID NO: 27858 - protein, 450 aa, synthetic construct; identical to SEQ ID NO: 26762
  REGION 1..450: note = Description of Artificial Sequence: Synthetic polypeptide
  REGION 1..450: note = XENP022349 WO2016059602[ICOS]_GSK_H0L0 one-arm mAb Fab-Fc Heavy Chain

SEQ ID NO: 27859 - protein, 121 aa, synthetic construct; identical to SEQ ID NO: 26343
  REGION 1..121: note = Description of Artificial Sequence: Synthetic polypeptide
  REGION 1..121: note = VH of XENP022349

SEQ ID NO: 27860 - protein, 5 aa, synthetic construct
  REGION 1..5: note = Description of Artificial Sequence: Synthetic peptide
  REGION 1..5: note = XENP022349 vhCDR1
DYAMH

SEQ ID NO: 27861 - protein, 17 aa, synthetic construct
  REGION 1..17: note = Description of Artificial Sequence: Synthetic peptide
  REGION 1..17: note = XENP022349 vhCDR2
LISIYSDHTNYNQKFQG

SEQ ID NO: 27862 - protein, 12 aa, synthetic construct
  REGION 1..12: note = Description of Artificial Sequence: Synthetic peptide
  REGION 1..12: note = XENP022349 vhCDR3
NNYGNYGWYFDV

SEQ ID NO: 27863 - protein, 231 aa, synthetic construct; identical to SEQ ID NO: 27198
  REGION 1..231: note = Description of Artificial Sequence: Synthetic polypeptide
  REGION 1..231: note = XENP022349 WO2016059602[ICOS]_GSK_H0L0 one-arm mAb Fc-only Heavy Chain

SEQ ID NO: 27864 - protein, 213 aa, synthetic construct; identical to SEQ ID NO: 26347
  REGION 1..213: note = Description of Artificial Sequence: Synthetic polypeptide
  REGION 1..213: note = XENP022349 WO2016059602[ICOS]_GSK_H0L0 one-arm mAb Light Chain

SEQ ID NO: 27865 - protein, 106 aa, synthetic construct; identical to SEQ ID NO: 26348
  REGION 1..106: note = Description of Artificial Sequence: Synthetic polypeptide
  REGION 1..106: note = VL of XENP022349

SEQ ID NO: 27866 - protein, 10 aa, synthetic construct
  REGION 1..10: note = Description of Artificial Sequence: Synthetic peptide
  REGION 1..10: note = XENP022349 vlCDR1
SASSSVSYMH

SEQ ID NO: 27867 - protein, 7 aa, synthetic construct
  REGION 1..7: note = Description of Artificial Sequence: Synthetic peptide
  REGION 1..7: note = XENP022349 vlCDR2
DTSKLAS

SEQ ID NO: 27868 - protein, 9 aa, synthetic construct
  REGION 1..9: note = Description of Artificial Sequence: Synthetic peptide
  REGION 1..9: note = XENP022349 vlCDR3
FQGSGYPYT

SEQ ID NO: 27869 - protein, 230 aa, synthetic construct
  REGION 1..230: note = Description of Artificial Sequence: Synthetic polypeptide
  REGION 1..230: note = XENP022050 [ICOS]_H0L0 _Fab_His Heavy Chain
QVQLVQSGAEVKKPGASVKVSCKASGYTFTGYYMHWVRQAPGQGLEWMGWINPHSGGTNYAQKFQGRVTMTRDTSISTAYMELSRLRSDDTAVYYCARTYYYDSSGYYHDAFDIWGQGTMVTVSSASTKGPSVFPLAPSSKSTSGGTAALGCLVKDYFPEPVTVSWNSGALTSGVHTFPAVLQSSGLYSLSSVVTVPSSSLGTQTYICNVNHKPSNTKVDKKVEPKSCGS

SEQ ID NO: 27870 - protein, 214 aa, synthetic construct; identical to SEQ ID NO: 26297
  REGION 1..214: note = Description of Artificial Sequence: Synthetic polypeptide
  REGION 1..214: note = XENP022050 [ICOS]_H0L0 _Fab_His Light Chain

SEQ ID NO: 27871 - protein, 230 aa, synthetic construct
  REGION 1..230: note = Description of Artificial Sequence: Synthetic polypeptide
  REGION 1..230: note = XENP022051 [ICOS]_H0.1_L0_Fab_His Heavy Chain
QVQLVQSGAEVKKPGASVKVSCKASGYTFTEYYMHWVRQAPGQGLEWMGWINPHSGGTNYAQKFQGRVTMTRDTSISTAYMELSRLRSDDTAVYYCARTYYYDSSGYYHDAFDIWGQGTMVTVSSASTKGPSVFPLAPSSKSTSGGTAALGCLVKDYFPEPVTVSWNSGALTSGVHTFPAVLQSSGLYSLSSVVTVPSSSLGTQTYICNVNHKPSNTKVDKKVEPKSCGS

SEQ ID NO: 27872 - protein, 214 aa, synthetic construct; identical to SEQ ID NO: 26297
  REGION 1..214: note = Description of Artificial Sequence: Synthetic polypeptide
  REGION 1..214: note = XENP022051 [ICOS]_H0.1_L0_Fab_His Light Chain

SEQ ID NO: 27873 - protein, 230 aa, synthetic construct
  REGION 1..230: note = Description of Artificial Sequence: Synthetic polypeptide
  REGION 1..230: note = XENP022052 [ICOS]_H0.2_L0_Fab_His Heavy Chain
QVQLVQSGAEVKKPGASVKVSCKASGYTFTSYYMHWVRQAPGQGLEWMGWINPHSGGTNYAQKFQGRVTMTRDTSISTAYMELSRLRSDDTAVYYCARTYYYDSSGYYHDAFDIWGQGTMVTVSSASTKGPSVFPLAPSSKSTSGGTAALGCLVKDYFPEPVTVSWNSGALTSGVHTFPAVLQSSGLYSLSSVVTVPSSSLGTQTYICNVNHKPSNTKVDKKVEPKSCGS

SEQ ID NO: 27874 - protein, 214 aa, synthetic construct; identical to SEQ ID NO: 26297
  REGION 1..214: note = Description of Artificial Sequence: Synthetic polypeptide
  REGION 1..214: note = XENP022052 [ICOS]_H0.2_L0_Fab_His Light Chain

SEQ ID NO: 27875 - protein, 230 aa, synthetic construct
  REGION 1..230: note = Description of Artificial Sequence: Synthetic polypeptide
  REGION 1..230: note = XENP022053 [ICOS]_H0.3_L0_Fab_His Heavy Chain
QVQLVQSGAEVKKPGASVKVSCKASGYTFTGYYMHWVRQAPGQGLEWMGIINPHSGGTNYAQKFQGRVTMTRDTSISTAYMELSRLRSDDTAVYYCARTYYYDSSGYYHDAFDIWGQGTMVTVSSASTKGPSVFPLAPSSKSTSGGTAALGCLVKDYFPEPVTVSWNSGALTSGVHTFPAVLQSSGLYSLSSVVTVPSSSLGTQTYICNVNHKPSNTKVDKKVEPKSCGS

SEQ ID NO: 27876 - protein, 214 aa, synthetic construct; identical to SEQ ID NO: 26297
  REGION 1..214: note = Description of Artificial Sequence: Synthetic polypeptide
  REGION 1..214: note = XENP022053 [ICOS]_H0.3_L0_Fab_His Light Chain

SEQ ID NO: 27877 - protein, 230 aa, synthetic construct
  REGION 1..230: note = Description of Artificial Sequence: Synthetic polypeptide
  REGION 1..230: note = XENP022054 [ICOS]_H0.4_L0_Fab_His Heavy Chain
QVQLVQSGAEVKKPGASVKVSCKASGYTFTGYYMHWVRQAPGQGLEWMGWINPESGGTNYAQKFQGRVTMTRDTSISTAYMELSRLRSDDTAVYYCARTYYYDSSGYYHDAFDIWGQGTMVTVSSASTKGPSVFPLAPSSKSTSGGTAALGCLVKDYFPEPVTVSWNSGALTSGVHTFPAVLQSSGLYSLSSVVTVPSSSLGTQTYICNVNHKPSNTKVDKKVEPKSCGS

SEQ ID NO: 27878 - protein, 214 aa, synthetic construct; identical to SEQ ID NO: 26297
  REGION 1..214: note = Description of Artificial Sequence: Synthetic polypeptide
  REGION 1..214: note = XENP022054 [ICOS]_H0.4_L0_Fab_His Light Chain

SEQ ID NO: 27879 - protein, 230 aa, synthetic construct
  REGION 1..230: note = Description of Artificial Sequence: Synthetic polypeptide
  REGION 1..230: note = XENP022055 [ICOS]_H0.5_L0_Fab_His Heavy Chain
QVQLVQSGAEVKKPGASVKVSCKASGYTFTGYYMHWVRQAPGQGLEWMGWINPSSGGTNYAQKFQGRVTMTRDTSISTAYMELSRLRSDDTAVYYCARTYYYDSSGYYHDAFDIWGQGTMVTVSSASTKGPSVFPLAPSSKSTSGGTAALGCLVKDYFPEPVTVSWNSGALTSGVHTFPAVLQSSGLYSLSSVVTVPSSSLGTQTYICNVNHKPSNTKVDKKVEPKSCGS

SEQ ID NO: 27880 - protein, 214 aa, synthetic construct; identical to SEQ ID NO: 26297
  REGION 1..214: note = Description of Artificial Sequence: Synthetic polypeptide
  REGION 1..214: note = XENP022055 [ICOS]_H0.5_L0_Fab_His Light Chain

SEQ ID NO: 27881 - protein, 230 aa, synthetic construct
  REGION 1..230: note = Description of Artificial Sequence: Synthetic polypeptide
  REGION 1..230: note = XENP022056 [ICOS]_H0.6_L0_Fab_His Heavy Chain
QVQLVQSGAEVKKPGASVKVSCKASGYTFTGYYMHWVRQAPGQGLEWMGWINPHGGGTNYAQKFQGRVTMTRDTSISTAYMELSRLRSDDTAVYYCARTYYYDSSGYYHDAFDIWGQGTMVTVSSASTKGPSVFPLAPSSKSTSGGTAALGCLVKDYFPEPVTVSWNSGALTSGVHTFPAVLQSSGLYSLSSVVTVPSSSLGTQTYICNVNHKPSNTKVDKKVEPKSCGS

SEQ ID NO: 27882 - protein, 214 aa, synthetic construct; identical to SEQ ID NO: 26297
  REGION 1..214: note = Description of Artificial Sequence: Synthetic polypeptide
  REGION 1..214: note = XENP022056 [ICOS]_H0.6_L0_Fab_His Light Chain

SEQ ID NO: 27883 - protein, 230 aa, synthetic construct
  REGION 1..230: note = Description of Artificial Sequence: Synthetic polypeptide
  REGION 1..230: note = XENP022057 [ICOS]_H0.7_L0_Fab_His Heavy Chain
QVQLVQSGAEVKKPGASVKVSCKASGYTFTGYYMHWVRQAPGQGLEWMGWINPHSGETNYAQKFQGRVTMTRDTSISTAYMELSRLRSDDTAVYYCARTYYYDSSGYYHDAFDIWGQGTMVTVSSASTKGPSVFPLAPSSKSTSGGTAALGCLVKDYFPEPVTVSWNSGALTSGVHTFPAVLQSSGLYSLSSVVTVPSSSLGTQTYICNVNHKPSNTKVDKKVEPKSCGS

SEQ ID NO: 27884 - protein, 214 aa, synthetic construct; identical to SEQ ID NO: 26297
  REGION 1..214: note = Description of Artificial Sequence: Synthetic polypeptide
  REGION 1..214: note = XENP022057 [ICOS]_H0.7_L0_Fab_His Light Chain

SEQ ID NO: 27885 - protein, 230 aa, synthetic construct
  REGION 1..230: note = Description of Artificial Sequence: Synthetic polypeptide
  REGION 1..230: note = XENP022058 [ICOS]_H0.8_L0_Fab_His Heavy Chain
QVQLVQSGAEVKKPGASVKVSCKASGYTFTGYYMHWVRQAPGQGLEWMGWINPHSGGTSYAQKFQGRVTMTRDTSISTAYMELSRLRSDDTAVYYCARTYYYDSSGYYHDAFDIWGQGTMVTVSSASTKGPSVFPLAPSSKSTSGGTAALGCLVKDYFPEPVTVSWNSGALTSGVHTFPAVLQSSGLYSLSSVVTVPSSSLGTQTYICNVNHKPSNTKVDKKVEPKSCGS

SEQ ID NO: 27886 - protein, 214 aa, synthetic construct; identical to SEQ ID NO: 26297
  REGION 1..214: note = Description of Artificial Sequence: Synthetic polypeptide
  REGION 1..214: note = XENP022058 [ICOS]_H0.8_L0_Fab_His Light Chain

SEQ ID NO: 27887 - protein, 230 aa, synthetic construct
  REGION 1..230: note = Description of Artificial Sequence: Synthetic polypeptide
  REGION 1..230: note = XENP022059 [ICOS]_H0.9_L0_Fab_His Heavy Chain
QVQLVQSGAEVKKPGASVKVSCKASGYTFTGYYMHWVRQAPGQGLEWMGWINPHSGGTNYAEKFQGRVTMTRDTSISTAYMELSRLRSDDTAVYYCARTYYYDSSGYYHDAFDIWGQGTMVTVSSASTKGPSVFPLAPSSKSTSGGTAALGCLVKDYFPEPVTVSWNSGALTSGVHTFPAVLQSSGLYSLSSVVTVPSSSLGTQTYICNVNHKPSNTKVDKKVEPKSCGS

SEQ ID NO: 27888 - protein, 214 aa, synthetic construct; identical to SEQ ID NO: 26297
  REGION 1..214: note = Description of Artificial Sequence: Synthetic polypeptide
  REGION 1..214: note = XENP022059 [ICOS]_H0.9_L0_Fab_His Light Chain

SEQ ID NO: 27889 - protein, 230 aa, synthetic construct
  REGION 1..230: note = Description of Artificial Sequence: Synthetic polypeptide
  REGION 1..230: note = XENP022060 [ICOS]_H0.10_L0_Fab_His Heavy Chain
QVQLVQSGAEVKKPGASVKVSCKASGYTFTGYYMHWVRQAPGQGLEWMGWINPHSGGTNYAQKFQERVTMTRDTSISTAYMELSRLRSDDTAVYYCARTYYYDSSGYYHDAFDIWGQGTMVTVSSASTKGPSVFPLAPSSKSTSGGTAALGCLVKDYFPEPVTVSWNSGALTSGVHTFPAVLQSSGLYSLSSVVTVPSSSLGTQTYICNVNHKPSNTKVDKKVEPKSCGS

SEQ ID NO: 27890 - protein, 214 aa, synthetic construct; identical to SEQ ID NO: 26297
  REGION 1..214: note = Description of Artificial Sequence: Synthetic polypeptide
  REGION 1..214: note = XENP022060 [ICOS]_H0.10_L0_Fab_His Light Chain

SEQ ID NO: 27891 - protein, 230 aa, synthetic construct
  REGION 1..230: note = Description of Artificial Sequence: Synthetic polypeptide
  REGION 1..230: note = XENP022061 [ICOS]_H0.11_L0_Fab_His Heavy Chain
QVQLVQSGAEVKKPGASVKVSCKASGYTFTGYYMHWVRQAPGQGLEWMGWINPHSGGTNYAQKFQGRVTITRDTSISTAYMELSRLRSDDTAVYYCARTYYYDSSGYYHDAFDIWGQGTMVTVSSASTKGPSVFPLAPSSKSTSGGTAALGCLVKDYFPEPVTVSWNSGALTSGVHTFPAVLQSSGLYSLSSVVTVPSSSLGTQTYICNVNHKPSNTKVDKKVEPKSCGS

SEQ ID NO: 27892 - protein, 214 aa, synthetic construct; identical to SEQ ID NO: 26297
  REGION 1..214: note = Description of Artificial Sequence: Synthetic polypeptide
  REGION 1..214: note = XENP022061 [ICOS]_H0.11_L0_Fab_His Light Chain

SEQ ID NO: 27893 - protein, 230 aa, synthetic construct
  REGION 1..230: note = Description of Artificial Sequence: Synthetic polypeptide
  REGION 1..230: note = XENP022062 [ICOS]_H0.12_L0_Fab_His Heavy Chain
QVQLVQSGAEVKKPGASVKVSCKASGYTFTGYYMHWVRQAPGQGLEWMGWINPHSGGTNYAQKFQGRVTMTADTSISTAYMELSRLRSDDTAVYYCARTYYYDSSGYYHDAFDIWGQGTMVTVSSASTKGPSVFPLAPSSKSTSGGTAALGCLVKDYFPEPVTVSWNSGALTSGVHTFPAVLQSSGLYSLSSVVTVPSSSLGTQTYICNVNHKPSNTKVDKKVEPKSCGS

SEQ ID NO: 27894 - protein, 214 aa, synthetic construct; identical to SEQ ID NO: 26297
  REGION 1..214: note = Description of Artificial Sequence: Synthetic polypeptide
  REGION 1..214: note = XENP022062 [ICOS]_H0.12_L0_Fab_His Light Chain

SEQ ID NO: 27895 - protein, 230 aa, synthetic construct
  REGION 1..230: note = Description of Artificial Sequence: Synthetic polypeptide
  REGION 1..230: note = XENP022063 [ICOS]_H0.13_L0_Fab_His Heavy Chain
QVQLVQSGAEVKKPGASVKVSCKASGYTFTGYYMHWVRQAPGQGLEWMGWINPHSGGTNYAQKFQGRVTMTEDTSISTAYMELSRLRSDDTAVYYCARTYYYDSSGYYHDAFDIWGQGTMVTVSSASTKGPSVFPLAPSSKSTSGGTAALGCLVKDYFPEPVTVSWNSGALTSGVHTFPAVLQSSGLYSLSSVVTVPSSSLGTQTYICNVNHKPSNTKVDKKVEPKSCGS

SEQ ID NO: 27896 - protein, 214 aa, synthetic construct; identical to SEQ ID NO: 26297
  REGION 1..214: note = Description of Artificial Sequence: Synthetic polypeptide
  REGION 1..214: note = XENP022063 [ICOS]_H0.13_L0_Fab_His Light Chain

SEQ ID NO: 27897 - protein, 230 aa, synthetic construct
  REGION 1..230: note = Description of Artificial Sequence: Synthetic polypeptide
  REGION 1..230: note = XENP022064 [ICOS]_H0.14_L0_Fab_His Heavy Chain
QVQLVQSGAEVKKPGASVKVSCKASGYTFTGYYMHWVRQAPGQGLEWMGWINPHSGGTNYAQKFQGRVTMTTDTSISTAYMELSRLRSDDTAVYYCARTYYYDSSGYYHDAFDIWGQGTMVTVSSASTKGPSVFPLAPSSKSTSGGTAALGCLVKDYFPEPVTVSWNSGALTSGVHTFPAVLQSSGLYSLSSVVTVPSSSLGTQTYICNVNHKPSNTKVDKKVEPKSCGS

SEQ ID NO: 27898 - protein, 214 aa, synthetic construct; identical to SEQ ID NO: 26297
  REGION 1..214: note = Description of Artificial Sequence: Synthetic polypeptide
  REGION 1..214: note = XENP022064 [ICOS]_H0.14_L0_Fab_His Light Chain

SEQ ID NO: 27899 - protein, 230 aa, synthetic construct
  REGION 1..230: note = Description of Artificial Sequence: Synthetic polypeptide
  REGION 1..230: note = XENP022065 [ICOS]_H0.15_L0_Fab_His Heavy Chain
QVQLVQSGAEVKKPGASVKVSCKASGYTFTGYYMHWVRQAPGQGLEWMGWINPHSGGTNYAQKFQGRVTMTRDESISTAYMELSRLRSDDTAVYYCARTYYYDSSGYYHDAFDIWGQGTMVTVSSASTKGPSVFPLAPSSKSTSGGTAALGCLVKDYFPEPVTVSWNSGALTSGVHTFPAVLQSSGLYSLSSVVTVPSSSLGTQTYICNVNHKPSNTKVDKKVEPKSCGS

SEQ ID NO: 27900 - protein, 214 aa, synthetic construct; identical to SEQ ID NO: 26297
  REGION 1..214: note = Description of Artificial Sequence: Synthetic polypeptide
  REGION 1..214: note = XENP022065 [ICOS]_H0.15_L0_Fab_His Light Chain

SEQ ID NO: 27901 - protein, 230 aa, synthetic construct
  REGION 1..230: note = Description of Artificial Sequence: Synthetic polypeptide
  REGION 1..230: note = XENP022066 [ICOS]_H0.16_L0_Fab_His Heavy Chain
QVQLVQSGAEVKKPGASVKVSCKASGYTFTGYYMHWVRQAPGQGLEWMGWINPHSGGTNYAQKFQGRVTMTRDTSTSTAYMELSRLRSDDTAVYYCARTYYYDSSGYYHDAFDIWGQGTMVTVSSASTKGPSVFPLAPSSKSTSGGTAALGCLVKDYFPEPVTVSWNSGALTSGVHTFPAVLQSSGLYSLSSVVTVPSSSLGTQTYICNVNHKPSNTKVDKKVEPKSCGS

SEQ ID NO: 27902 - protein, 214 aa, synthetic construct; identical to SEQ ID NO: 26297
  REGION 1..214: note = Description of Artificial Sequence: Synthetic polypeptide
  REGION 1..214: note = XENP022066 [ICOS]_H0.16_L0_Fab_His Light Chain

SEQ ID NO: 27903 - protein, 230 aa, synthetic construct
  REGION 1..230: note = Description of Artificial Sequence: Synthetic polypeptide
  REGION 1..230: note = XENP022067 [ICOS]_H0.17_L0_Fab_His Heavy Chain
QVQLVQSGAEVKKPGASVKVSCKASGYTFTGYYMHWVRQAPGQGLEWMGWINPHSGGTNYAQKFQGRVTMTRDTSISTAYMELSSLRSDDTAVYYCARTYYYDSSGYYHDAFDIWGQGTMVTVSSASTKGPSVFPLAPSSKSTSGGTAALGCLVKDYFPEPVTVSWNSGALTSGVHTFPAVLQSSGLYSLSSVVTVPSSSLGTQTYICNVNHKPSNTKVDKKVEPKSCGS

SEQ ID NO: 27904 - protein, 214 aa, synthetic construct; identical to SEQ ID NO: 26297
  REGION 1..214: note = Description of Artificial Sequence: Synthetic polypeptide
  REGION 1..214: note = XENP022067 [ICOS]_H0.17_L0_Fab_His Light Chain

SEQ ID NO: 27905 - protein, 230 aa, synthetic construct
  REGION 1..230: note = Description of Artificial Sequence: Synthetic polypeptide
  REGION 1..230: note = XENP022068 [ICOS]_H0.18_L0_Fab_His Heavy Chain
QVQLVQSGAEVKKPGASVKVSCKASGYTFTGYYMHWVRQAPGQGLEWMGWINPHSGGTNYAQKFQGRVTMTRDTSISTAYMELSRLRSEDTAVYYCARTYYYDSSGYYHDAFDIWGQGTMVTVSSASTKGPSVFPLAPSSKSTSGGTAALGCLVKDYFPEPVTVSWNSGALTSGVHTFPAVLQSSGLYSLSSVVTVPSSSLGTQTYICNVNHKPSNTKVDKKVEPKSCGS

SEQ ID NO: 27906 - protein, 214 aa, synthetic construct; identical to SEQ ID NO: 26297
  REGION 1..214: note = Description of Artificial Sequence: Synthetic polypeptide
  REGION 1..214: note = XENP022068 [ICOS]_H0.18_L0_Fab_His Light Chain

SEQ ID NO: 27907 - protein, 230 aa, synthetic construct
  REGION 1..230: note = Description of Artificial Sequence: Synthetic polypeptide
  REGION 1..230: note = XENP022069 [ICOS]_H0.19_L0_Fab_His Heavy Chain
QVQLVQSGAEVKKPGASVKVSCKASGYTFTGYYMHWVRQAPGQGLEWMGWINPHSGGTNYAQKFQGRVTMTRDTSISTAYMELSRLRSDDTAVYYCARTYYYASSGYYHDAFDIWGQGTMVTVSSASTKGPSVFPLAPSSKSTSGGTAALGCLVKDYFPEPVTVSWNSGALTSGVHTFPAVLQSSGLYSLSSVVTVPSSSLGTQTYICNVNHKPSNTKVDKKVEPKSCGS

SEQ ID NO: 27908 - protein, 214 aa, synthetic construct; identical to SEQ ID NO: 26297
  REGION 1..214: note = Description of Artificial Sequence: Synthetic polypeptide
  REGION 1..214: note = XENP022069 [ICOS]_H0.19_L0_Fab_His Light Chain

SEQ ID NO: 27909 - protein, 230 aa, synthetic construct
  REGION 1..230: note = Description of Artificial Sequence: Synthetic polypeptide
  REGION 1..230: note = XENP022070 [ICOS]_H0.20_L0_Fab_His Heavy Chain
QVQLVQSGAEVKKPGASVKVSCKASGYTFTGYYMHWVRQAPGQGLEWMGWINPHSGGTNYAQKFQGRVTMTRDTSISTAYMELSRLRSDDTAVYYCARTYYYESSGYYHDAFDIWGQGTMVTVSSASTKGPSVFPLAPSSKSTSGGTAALGCLVKDYFPEPVTVSWNSGALTSGVHTFPAVLQSSGLYSLSSVVTVPSSSLGTQTYICNVNHKPSNTKVDKKVEPKSCGS

SEQ ID NO: 27910 - protein, 214 aa, synthetic construct; identical to SEQ ID NO: 26297
  REGION 1..214: note = Description of Artificial Sequence: Synthetic polypeptide
  REGION 1..214: note = XENP022070 [ICOS]_H0.20_L0_Fab_His Light Chain

SEQ ID NO: 27911 - protein, 230 aa, synthetic construct
  REGION 1..230: note = Description of Artificial Sequence: Synthetic polypeptide
  REGION 1..230: note = XENP022071 [ICOS]_H0.21_L0_Fab_His Heavy Chain
QVQLVQSGAEVKKPGASVKVSCKASGYTFTGYYMHWVRQAPGQGLEWMGWINPHSGGTNYAQKFQGRVTMTRDTSISTAYMELSRLRSDDTAVYYCARTYYYQSSGYYHDAFDIWGQGTMVTVSSASTKGPSVFPLAPSSKSTSGGTAALGCLVKDYFPEPVTVSWNSGALTSGVHTFPAVLQSSGLYSLSSVVTVPSSSLGTQTYICNVNHKPSNTKVDKKVEPKSCGS

SEQ ID NO: 27912 - protein, 214 aa, synthetic construct; identical to SEQ ID NO: 26297
  REGION 1..214: note = Description of Artificial Sequence: Synthetic polypeptide
  REGION 1..214: note = XENP022071 [ICOS]_H0.21_L0_Fab_His Light Chain

SEQ ID NO: 27913 - protein, 230 aa, synthetic construct
  REGION 1..230: note = Description of Artificial Sequence: Synthetic polypeptide
  REGION 1..230: note = XENP022072 [ICOS]_H0.22_L0_Fab_His Heavy Chain
QVQLVQSGAEVKKPGASVKVSCKASGYTFTGYYMHWVRQAPGQGLEWMGWINPHSGGTNYAQKFQGRVTMTRDTSISTAYMELSRLRSDDTAVYYCARTYYYSSSGYYHDAFDIWGQGTMVTVSSASTKGPSVFPLAPSSKSTSGGTAALGCLVKDYFPEPVTVSWNSGALTSGVHTFPAVLQSSGLYSLSSVVTVPSSSLGTQTYICNVNHKPSNTKVDKKVEPKSCGS

SEQ ID NO: 27914 - protein, 214 aa, synthetic construct; identical to SEQ ID NO: 26297
  REGION 1..214: note = Description of Artificial Sequence: Synthetic polypeptide
  REGION 1..214: note = XENP022072 [ICOS]_H0.22_L0_Fab_His Light Chain

SEQ ID NO: 27915 - protein, 230 aa, synthetic construct
  REGION 1..230: note = Description of Artificial Sequence: Synthetic polypeptide
  REGION 1..230: note = XENP022073 [ICOS]_H0.23_L0_Fab_His Heavy Chain
QVQLVQSGAEVKKPGASVKVSCKASGYTFTGYYMHWVRQAPGQGLEWMGWINPHSGGTNYAQKFQGRVTMTRDTSISTAYMELSRLRSDDTAVYYCARTYYYTSSGYYHDAFDIWGQGTMVTVSSASTKGPSVFPLAPSSKSTSGGTAALGCLVKDYFPEPVTVSWNSGALTSGVHTFPAVLQSSGLYSLSSVVTVPSSSLGTQTYICNVNHKPSNTKVDKKVEPKSCGS

SEQ ID NO: 27916 - protein, 214 aa, synthetic construct; identical to SEQ ID NO: 26297
  REGION 1..214: note = Description of Artificial Sequence: Synthetic polypeptide
  REGION 1..214: note = XENP022073 [ICOS]_H0.23_L0_Fab_His Light Chain

SEQ ID NO: 27917 - protein, 230 aa, synthetic construct
  REGION 1..230: note = Description of Artificial Sequence: Synthetic polypeptide
  REGION 1..230: note = XENP022074 [ICOS]_H0.24_L0_Fab_His Heavy Chain
QVQLVQSGAEVKKPGASVKVSCKASGYTFTGYYMHWVRQAPGQGLEWMGWINPHSGGTNYAQKFQGRVTMTRDTSISTAYMELSRLRSDDTAVYYCARTYYYDTSGYYHDAFDIWGQGTMVTVSSASTKGPSVFPLAPSSKSTSGGTAALGCLVKDYFPEPVTVSWNSGALTSGVHTFPAVLQSSGLYSLSSVVTVPSSSLGTQTYICNVNHKPSNTKVDKKVEPKSCGS

SEQ ID NO: 27918 - protein, 214 aa, synthetic construct; identical to SEQ ID NO: 26297
  REGION 1..214: note = Description of Artificial Sequence: Synthetic polypeptide
  REGION 1..214: note = XENP022074 [ICOS]_H0.24_L0_Fab_His Light Chain

SEQ ID NO: 27919 - protein, 230 aa, synthetic construct
  REGION 1..230: note = Description of Artificial Sequence: Synthetic polypeptide
  REGION 1..230: note = XENP022075 [ICOS]_H0.25_L0_Fab_His Heavy Chain
QVQLVQSGAEVKKPGASVKVSCKASGYTFTGYYMHWVRQAPGQGLEWMGWINPHSGGTNYAQKFQGRVTMTRDTSISTAYMELSRLRSDDTAVYYCARTYYYDSSGYYEDAFDIWGQGTMVTVSSASTKGPSVFPLAPSSKSTSGGTAALGCLVKDYFPEPVTVSWNSGALTSGVHTFPAVLQSSGLYSLSSVVTVPSSSLGTQTYICNVNHKPSNTKVDKKVEPKSCGS

SEQ ID NO: 27920 - protein, 214 aa, synthetic construct; identical to SEQ ID NO: 26297
  REGION 1..214: note = Description of Artificial Sequence: Synthetic polypeptide
  REGION 1..214: note = XENP022075 [ICOS]_H0.25_L0_Fab_His Light Chain

SEQ ID NO: 27921 - protein, 230 aa, synthetic construct
  REGION 1..230: note = Description of Artificial Sequence: Synthetic polypeptide
  REGION 1..230: note = XENP022076 [ICOS]_H0.26_L0_Fab_His Heavy Chain
QVQLVQSGAEVKKPGASVKVSCKASGYTFTGYYMHWVRQAPGQGLEWMGWINPHSGGTNYAQKFQGRVTMTRDTSISTAYMELSRLRSDDTAVYYCARTYYYDSSGYYQDAFDIWGQGTMVTVSSASTKGPSVFPLAPSSKSTSGGTAALGCLVKDYFPEPVTVSWNSGALTSGVHTFPAVLQSSGLYSLSSVVTVPSSSLGTQTYICNVNHKPSNTKVDKKVEPKSCGS

SEQ ID NO: 27922 - protein, 214 aa, synthetic construct; identical to SEQ ID NO: 26297
  REGION 1..214: note = Description of Artificial Sequence: Synthetic polypeptide
  REGION 1..214: note = XENP022076 [ICOS]_H0.26_L0_Fab_His Light Chain

SEQ ID NO: 27923 - protein, 230 aa, synthetic construct
  REGION 1..230: note = Description of Artificial Sequence: Synthetic polypeptide
  REGION 1..230: note = XENP022077 [ICOS]_H0.27_L0_Fab_His Heavy Chain
QVQLVQSGAEVKKPGASVKVSCKASGYTFTGYYMHWVRQAPGQGLEWMGWINPHSGGTNYAQKFQGRVTMTRDTSISTAYMELSRLRSDDTAVYYCARTYYYDSSGYYSDAFDIWGQGTMVTVSSASTKGPSVFPLAPSSKSTSGGTAALGCLVKDYFPEPVTVSWNSGALTSGVHTFPAVLQSSGLYSLSSVVTVPSSSLGTQTYICNVNHKPSNTKVDKKVEPKSCGS

SEQ ID NO: 27924 - protein, 214 aa, synthetic construct; identical to SEQ ID NO: 26297
  REGION 1..214: note = Description of Artificial Sequence: Synthetic polypeptide
  REGION 1..214: note = XENP022077 [ICOS]_H0.27_L0_Fab_His Light Chain

SEQ ID NO: 27925 - protein, 230 aa, synthetic construct
  REGION 1..230: note = Description of Artificial Sequence: Synthetic polypeptide
  REGION 1..230: note = XENP022078 [ICOS]_H0.28_L0_Fab_His Heavy Chain
QVQLVQSGAEVKKPGASVKVSCKASGYTFTGYYMHWVRQAPGQGLEWMGWINPHSGGTNYAQKFQGRVTMTRDTSISTAYMELSRLRSDDTAVYYCARTYYYDSSGYYYDAFDIWGQGTMVTVSSASTKGPSVFPLAPSSKSTSGGTAALGCLVKDYFPEPVTVSWNSGALTSGVHTFPAVLQSSGLYSLSSVVTVPSSSLGTQTYICNVNHKPSNTKVDKKVEPKSCGS

SEQ ID NO: 27926 - protein, 214 aa, synthetic construct; identical to SEQ ID NO: 26297
  REGION 1..214: note = Description of Artificial Sequence: Synthetic polypeptide
  REGION 1..214: note = XENP022078 [ICOS]_H0.28_L0_Fab_His Light Chain

SEQ ID NO: 27927 - protein, 230 aa, synthetic construct
  REGION 1..230: note = Description of Artificial Sequence: Synthetic polypeptide
  REGION 1..230: note = XENP022079 [ICOS]_H0.29_L0_Fab_His Heavy Chain
QVQLVQSGAEVKKPGASVKVSCKASGYTFTGYYMHWVRQAPGQGLEWMGWINPHSGGTNYAQKFQGRVTMTRDTSISTAYMELSRLRSDDTAVYYCARTYYYDSSGYYHAAFDIWGQGTMVTVSSASTKGPSVFPLAPSSKSTSGGTAALGCLVKDYFPEPVTVSWNSGALTSGVHTFPAVLQSSGLYSLSSVVTVPSSSLGTQTYICNVNHKPSNTKVDKKVEPKSCGS

SEQ ID NO: 27928 - protein, 214 aa, synthetic construct; identical to SEQ ID NO: 26297
  REGION 1..214: note = Description of Artificial Sequence: Synthetic polypeptide
  REGION 1..214: note = XENP022079 [ICOS]_H0.29_L0_Fab_His Light Chain

SEQ ID NO: 27929 - protein, 230 aa, synthetic construct
  REGION 1..230: note = Description of Artificial Sequence: Synthetic polypeptide
  REGION 1..230: note = XENP022080 [ICOS]_H0.30_L0_Fab_His Heavy Chain
QVQLVQSGAEVKKPGASVKVSCKASGYTFTGYYMHWVRQAPGQGLEWMGWINPHSGGTNYAQKFQGRVTMTRDTSISTAYMELSRLRSDDTAVYYCARTYYYDSSGYYHEAFDIWGQGTMVTVSSASTKGPSVFPLAPSSKSTSGGTAALGCLVKDYFPEPVTVSWNSGALTSGVHTFPAVLQSSGLYSLSSVVTVPSSSLGTQTYICNVNHKPSNTKVDKKVEPKSCGS

SEQ ID NO: 27930 - protein, 214 aa, synthetic construct; identical to SEQ ID NO: 26297
  REGION 1..214: note = Description of Artificial Sequence: Synthetic polypeptide
  REGION 1..214: note = XENP022080 [ICOS]_H0.30_L0_Fab_His Light Chain

SEQ ID NO: 27931 - protein, 230 aa, synthetic construct
  REGION 1..230: note = Description of Artificial Sequence: Synthetic polypeptide
  REGION 1..230: note = XENP022081 [ICOS]_H0.31_L0_Fab_His Heavy Chain
QVQLVQSGAEVKKPGASVKVSCKASGYTFTGYYMHWVRQAPGQGLEWMGWINPHSGGTNYAQKFQGRVTMTRDTSISTAYMELSRLRSDDTAVYYCARTYYYDSSGYYHQAFDIWGQGTMVTVSSASTKGPSVFPLAPSSKSTSGGTAALGCLVKDYFPEPVTVSWNSGALTSGVHTFPAVLQSSGLYSLSSVVTVPSSSLGTQTYICNVNHKPSNTKVDKKVEPKSCGS

SEQ ID NO: 27932 - protein, 214 aa, synthetic construct; identical to SEQ ID NO: 26297
  REGION 1..214: note = Description of Artificial Sequence: Synthetic polypeptide
  REGION 1..214: note = XENP022081 [ICOS]_H0.31_L0_Fab_His Light Chain

SEQ ID NO: 27933 - protein, 230 aa, synthetic construct
  REGION 1..230: note = Description of Artificial Sequence: Synthetic polypeptide
  REGION 1..230: note = XENP022082 [ICOS]_H0.32_L0_Fab_His Heavy Chain
QVQLVQSGAEVKKPGASVKVSCKASGYTFTGYYMHWVRQAPGQGLEWMGWINPHSGGTNYAQKFQGRVTMTRDTSISTAYMELSRLRSDDTAVYYCARTYYYDSSGYYHSAFDIWGQGTMVTVSSASTKGPSVFPLAPSSKSTSGGTAALGCLVKDYFPEPVTVSWNSGALTSGVHTFPAVLQSSGLYSLSSVVTVPSSSLGTQTYICNVNHKPSNTKVDKKVEPKSCGS

SEQ ID NO: 27934 - protein, 214 aa, synthetic construct; identical to SEQ ID NO: 26297
  REGION 1..214: note = Description of Artificial Sequence: Synthetic polypeptide
  REGION 1..214: note = XENP022082 [ICOS]_H0.32_L0_Fab_His Light Chain

SEQ ID NO: 27935 - protein, 230 aa, synthetic construct
  REGION 1..230: note = Description of Artificial Sequence: Synthetic polypeptide
  REGION 1..230: note = XENP022083 [ICOS]_H0.33_L0_Fab_His Heavy Chain
QVQLVQSGAEVKKPGASVKVSCKASGYTFTGYYMHWVRQAPGQGLEWMGWINPHSGGTNYAQKFQGRVTMTRDTSISTAYMELSRLRSDDTAVYYCARTYYYDSSGYYHTAFDIWGQGTMVTVSSASTKGPSVFPLAPSSKSTSGGTAALGCLVKDYFPEPVTVSWNSGALTSGVHTFPAVLQSSGLYSLSSVVTVPSSSLGTQTYICNVNHKPSNTKVDKKVEPKSCGS

SEQ ID NO: 27936 - protein, 214 aa, synthetic construct; identical to SEQ ID NO: 26297
  REGION 1..214: note = Description of Artificial Sequence: Synthetic polypeptide
  REGION 1..214: note = XENP022083 [ICOS]_H0.33_L0_Fab_His Light Chain

SEQ ID NO: 27937 - protein, 230 aa, synthetic construct
  REGION 1..230: note = Description of Artificial Sequence: Synthetic polypeptide
  REGION 1..230: note = XENP022084 [ICOS]_H0.34_L0_Fab_His Heavy Chain
QVQLVQSGAEVKKPGASVKVSCKASGYTFTGYYMHWVRQAPGQGLEWMGWINPHSGGTNYAQKFQGRVTMTRDTSISTAYMELSRLRSDDTAVYYCARTYYYDSSGYYHDAFDVWGQGTMVTVSSASTKGPSVFPLAPSSKSTSGGTAALGCLVKDYFPEPVTVSWNSGALTSGVHTFPAVLQSSGLYSLSSVVTVPSSSLGTQTYICNVNHKPSNTKVDKKVEPKSCGS

SEQ ID NO: 27938 - protein, 214 aa, synthetic construct; identical to SEQ ID NO: 26297
  REGION 1..214: note = Description of Artificial Sequence: Synthetic polypeptide
  REGION 1..214: note = XENP022084 [ICOS]_H0.34_L0_Fab_His Light Chain

SEQ ID NO: 27939 - protein, 230 aa, synthetic construct; identical to SEQ ID NO: 27869
  REGION 1..230: note = Description of Artificial Sequence: Synthetic polypeptide
  REGION 1..230: note = XENP022085 [ICOS]_H0_L0.1_Fab_His Heavy Chain

SEQ ID NO: 27940 - protein, 214 aa, synthetic construct
  REGION 1..214: note = Description of Artificial Sequence: Synthetic polypeptide
  REGION 1..214: note = XENP022085 [ICOS]_H0_L0.1_Fab_His Light Chain
DIQMTQSPSSLSASVGDRVTITCRASQGISRLLAWYQQKPGKAPKLLIYVASSLQSGVPSRFSGSGSGTDFTLTISSLQPEDFATYYCQQANSFPWTFGQGTKVEIKRTVAAPSVFIFPPSDEQLKSGTASVVCLLNNFYPREAKVQWKVDNALQSGNSQESVTEQDSKDSTYSLSSTLTLSKADYEKHKVYACEVTHQGLSSPVTKSFNRGEC

SEQ ID NO: 27941 - protein, 230 aa, synthetic construct; identical to SEQ ID NO: 27869
  REGION 1..230: note = Description of Artificial Sequence: Synthetic polypeptide
  REGION 1..230: note = XENP022086 [ICOS]_H0_L0.2_Fab_His Heavy Chain

SEQ ID NO: 27942 - protein, 214 aa, synthetic construct
  REGION 1..214: note = Description of Artificial Sequence: Synthetic polypeptide
  REGION 1..214: note = XENP022086 [ICOS]_H0_L0.2_Fab_His Light Chain
DIQMTQSPSSVSASVGDRVTITCQASQGISRLLAWYQQKPGKAPKLLIYVASSLQSGVPSRFSGSGSGTDFTLTISSLQPEDFATYYCQQANSFPWTFGQGTKVEIKRTVAAPSVFIFPPSDEQLKSGTASVVCLLNNFYPREAKVQWKVDNALQSGNSQESVTEQDSKDSTYSLSSTLTLSKADYEKHKVYACEVTHQGLSSPVTKSFNRGEC

SEQ ID NO: 27943 - protein, 230 aa, synthetic construct; identical to SEQ ID NO: 27869
  REGION 1..230: note = Description of Artificial Sequence: Synthetic polypeptide
  REGION 1..230: note = XENP022087 [ICOS]_H0_L0.3_Fab_His Heavy Chain

SEQ ID NO: 27944 - protein, 214 aa, synthetic construct
  REGION 1..214: note = Description of Artificial Sequence: Synthetic polypeptide
  REGION 1..214: note = XENP022087 [ICOS]_H0_L0.3_Fab_His Light Chain
DIQMTQSPSSVSASVGDRVTITCRASQDISRLLAWYQQKPGKAPKLLIYVASSLQSGVPSRFSGSGSGTDFTLTISSLQPEDFATYYCQQANSFPWTFGQGTKVEIKRTVAAPSVFIFPPSDEQLKSGTASVVCLLNNFYPREAKVQWKVDNALQSGNSQESVTEQDSKDSTYSLSSTLTLSKADYEKHKVYACEVTHQGLSSPVTKSFNRGEC

SEQ ID NO: 27945 - protein, 230 aa, synthetic construct; identical to SEQ ID NO: 27869
  REGION 1..230: note = Description of Artificial Sequence: Synthetic polypeptide
  REGION 1..230: note = XENP022088 [ICOS]_H0_L0.4_Fab_His Heavy Chain

SEQ ID NO: 27946 - protein, 214 aa, synthetic construct
  REGION 1..214: note = Description of Artificial Sequence: Synthetic polypeptide
  REGION 1..214: note = XENP022088 [ICOS]_H0_L0.4_Fab_His Light Chain
DIQMTQSPSSVSASVGDRVTITCRASQSISRLLAWYQQKPGKAPKLLIYVASSLQSGVPSRFSGSGSGTDFTLTISSLQPEDFATYYCQQANSFPWTFGQGTKVEIKRTVAAPSVFIFPPSDEQLKSGTASVVCLLNNFYPREAKVQWKVDNALQSGNSQESVTEQDSKDSTYSLSSTLTLSKADYEKHKVYACEVTHQGLSSPVTKSFNRGEC

SEQ ID NO: 27947 - protein, 230 aa, synthetic construct; identical to SEQ ID NO: 27869
  REGION 1..230: note = Description of Artificial Sequence: Synthetic polypeptide
  REGION 1..230: note = XENP022089 [ICOS]_H0_L0.5_Fab_His Heavy Chain

SEQ ID NO: 27948 - protein, 214 aa, synthetic construct; identical to SEQ ID NO: 27243
  REGION 1..214: note = Description of Artificial Sequence: Synthetic polypeptide
  REGION 1..214: note = XENP022089 [ICOS]_H0_L0.5_Fab_His Light Chain

SEQ ID NO: 27949 - protein, 230 aa, synthetic construct; identical to SEQ ID NO: 27869
  REGION 1..230: note = Description of Artificial Sequence: Synthetic polypeptide
  REGION 1..230: note = XENP022090 [ICOS]_H0_L0.6_Fab_His Heavy Chain

SEQ ID NO: 27950 - protein, 214 aa, synthetic construct
  REGION 1..214: note = Description of Artificial Sequence: Synthetic polypeptide
  REGION 1..214: note = XENP022090 [ICOS]_H0_L0.6_Fab_His Light Chain
DIQMTQSPSSVSASVGDRVTITCRASQGISSWLAWYQQKPGKAPKLLIYVASSLQSGVPSRFSGSGSGTDFTLTISSLQPEDFATYYCQQANSFPWTFGQGTKVEIKRTVAAPSVFIFPPSDEQLKSGTASVVCLLNNFYPREAKVQWKVDNALQSGNSQESVTEQDSKDSTYSLSSTLTLSKADYEKHKVYACEVTHQGLSSPVTKSFNRGEC

SEQ ID NO: 27951 - protein, 230 aa, synthetic construct; identical to SEQ ID NO: 27869
  REGION 1..230: note = Description of Artificial Sequence: Synthetic polypeptide
  REGION 1..230: note = XENP022091 [ICOS]_H0_L0.7_Fab_His Heavy Chain

SEQ ID NO: 27952 - protein, 214 aa, synthetic construct; identical to SEQ ID NO: 26477
  REGION 1..214: note = Description of Artificial Sequence: Synthetic polypeptide
  REGION 1..214: note = XENP022091 [ICOS]_H0_L0.7_Fab_His Light Chain

SEQ ID NO: 27953 - protein, 230 aa, synthetic construct; identical to SEQ ID NO: 27869
  REGION 1..230: note = Description of Artificial Sequence: Synthetic polypeptide
  REGION 1..230: note = XENP022092 [ICOS]_H0_L0.8_Fab_His Heavy Chain

SEQ ID NO: 27954 - protein, 214 aa, synthetic construct
  REGION 1..214: note = Description of Artificial Sequence: Synthetic polypeptide
  REGION 1..214: note = XENP022092 [ICOS]_H0_L0.8_Fab_His Light Chain
DIQMTQSPSSVSASVGDRVTITCRASQGISRWLAWYQQKPGKAPKLLIYVASSLQSGVPSRFSGSGSGTDFTLTISSLQPEDFATYYCQQANSFPWTFGQGTKVEIKRTVAAPSVFIFPPSDEQLKSGTASVVCLLNNFYPREAKVQWKVDNALQSGNSQESVTEQDSKDSTYSLSSTLTLSKADYEKHKVYACEVTHQGLSSPVTKSFNRGEC

SEQ ID NO: 27955 - protein, 230 aa, synthetic construct; identical to SEQ ID NO: 27869
  REGION 1..230: note = Description of Artificial Sequence: Synthetic polypeptide
  REGION 1..230: note = XENP022093 [ICOS]_H0_L0.9_Fab_His Heavy Chain

SEQ ID NO: 27956 - protein, 214 aa, synthetic construct; identical to SEQ ID NO: 27265
  REGION 1..214: note = Description of Artificial Sequence: Synthetic polypeptide
  REGION 1..214: note = XENP022093 [ICOS]_H0_L0.9_Fab_His Light Chain

SEQ ID NO: 27957 - protein, 230 aa, synthetic construct; identical to SEQ ID NO: 27869
  REGION 1..230: note = Description of Artificial Sequence: Synthetic polypeptide
  REGION 1..230: note = XENP022094 [ICOS]_H0_L0.10_Fab_His Heavy Chain

SEQ ID NO: 27958 - protein, 214 aa, synthetic construct; identical to SEQ ID NO: 27276
  REGION 1..214: note = Description of Artificial Sequence: Synthetic polypeptide
  REGION 1..214: note = XENP022094 [ICOS]_H0_L0.10_Fab_His Light Chain

SEQ ID NO: 27959 - protein, 230 aa, synthetic construct; identical to SEQ ID NO: 27869
  REGION 1..230: note = Description of Artificial Sequence: Synthetic polypeptide
  REGION 1..230: note = XENP022095 [ICOS]_H0_L0.11_Fab_His Heavy Chain

SEQ ID NO: 27960 - protein, 214 aa, synthetic construct
  REGION 1..214: note = Description of Artificial Sequence: Synthetic polypeptide
  REGION 1..214: note = XENP022095 [ICOS]_H0_L0.11_Fab_His Light Chain
DIQMTQSPSSVSASVGDRVTITCRASQGISRLLAWYQQKPGKAPKLLIYSASSLQSGVPSRFSGSGSGTDFTLTISSLQPEDFATYYCQQANSFPWTFGQGTKVEIKRTVAAPSVFIFPPSDEQLKSGTASVVCLLNNFYPREAKVQWKVDNALQSGNSQESVTEQDSKDSTYSLSSTLTLSKADYEKHKVYACEVTHQGLSSPVTKSFNRGEC

SEQ ID NO: 27961 - protein, 230 aa, synthetic construct; identical to SEQ ID NO: 27869
  REGION 1..230: note = Description of Artificial Sequence: Synthetic polypeptide
  REGION 1..230: note = XENP022096 [ICOS]_H0_L0.12_Fab_His Heavy Chain

SEQ ID NO: 27962 - protein, 214 aa, synthetic construct
  REGION 1..214: note = Description of Artificial Sequence: Synthetic polypeptide
  REGION 1..214: note = XENP022096 [ICOS]_H0_L0.12_Fab_His Light Chain
DIQMTQSPSSVSASVGDRVTITCRASQGISRLLAWYQQKPGKAPKLLIYVASTLQSGVPSRFSGSGSGTDFTLTISSLQPEDFATYYCQQANSFPWTFGQGTKVEIKRTVAAPSVFIFPPSDEQLKSGTASVVCLLNNFYPREAKVQWKVDNALQSGNSQESVTEQDSKDSTYSLSSTLTLSKADYEKHKVYACEVTHQGLSSPVTKSFNRGEC

SEQ ID NO: 27963 - protein, 230 aa, synthetic construct; identical to SEQ ID NO: 27869
  REGION 1..230: note = Description of Artificial Sequence: Synthetic polypeptide
  REGION 1..230: note = XENP022101 [ICOS]_H0_L0.13_Fab_His Heavy Chain

SEQ ID NO: 27964 - protein, 214 aa, synthetic construct
  REGION 1..214: note = Description of Artificial Sequence: Synthetic polypeptide
  REGION 1..214: note = XENP022101 [ICOS]_H0_L0.13_Fab_His Light Chain
DIQMTQSPSSVSASVGDRVTITCRASQGISRLLAWYQQKPGKAPKLLIYVASSLESGVPSRFSGSGSGTDFTLTISSLQPEDFATYYCQQANSFPWTFGQGTKVEIKRTVAAPSVFIFPPSDEQLKSGTASVVCLLNNFYPREAKVQWKVDNALQSGNSQESVTEQDSKDSTYSLSSTLTLSKADYEKHKVYACEVTHQGLSSPVTKSFNRGEC

SEQ ID NO: 27965 - protein, 230 aa, synthetic construct; identical to SEQ ID NO: 27869
  REGION 1..230: note = Description of Artificial Sequence: Synthetic polypeptide
  REGION 1..230: note = XENP022102 [ICOS]_H0_L0.14_Fab_His Heavy Chain

SEQ ID NO: 27966 - protein, 214 aa, synthetic construct; identical to SEQ ID NO: 27287
  REGION 1..214: note = Description of Artificial Sequence: Synthetic polypeptide
  REGION 1..214: note = XENP022102 [ICOS]_H0_L0.14_Fab_His Light Chain

SEQ ID NO: 27967 - protein, 230 aa, synthetic construct; identical to SEQ ID NO: 27869
  REGION 1..230: note = Description of Artificial Sequence: Synthetic polypeptide
  REGION 1..230: note = XENP022103 [ICOS]_H0_L0.15_Fab_His Heavy Chain

SEQ ID NO: 27968 - protein, 214 aa, synthetic construct; identical to SEQ ID NO: 27298
  REGION 1..214: note = Description of Artificial Sequence: Synthetic polypeptide
  REGION 1..214: note = XENP022103 [ICOS]_H0_L0.15_Fab_His Light Chain

SEQ ID NO: 27969 - protein, 230 aa, synthetic construct; identical to SEQ ID NO: 27869
  REGION 1..230: note = Description of Artificial Sequence: Synthetic polypeptide
  REGION 1..230: note = XENP022104 [ICOS]_H0_L0.16_Fab_His Heavy Chain

SEQ ID NO: 27970 - protein, 214 aa, synthetic construct
  REGION 1..214: note = Description of Artificial Sequence: Synthetic polypeptide
  REGION 1..214: note = XENP022104 [ICOS]_H0_L0.16_Fab_His Light Chain
DIQMTQSPSSVSASVGDRVTITCRASQGISRLLAWYQQKPGKAPKLLIYVASSLQSGVPSRFSGSGSGTDFTLTISSLQPEDFATYYCQQAQSFPWTFGQGTKVEIKRTVAAPSVFIFPPSDEQLKSGTASVVCLLNNFYPREAKVQWKVDNALQSGNSQESVTEQDSKDSTYSLSSTLTLSKADYEKHKVYACEVTHQGLSSPVTKSFNRGEC

SEQ ID NO: 27971 - protein, 230 aa, synthetic construct; identical to SEQ ID NO: 27869
  REGION 1..230: note = Description of Artificial Sequence: Synthetic polypeptide
  REGION 1..230: note = XENP022105 [ICOS]_H0_L0.17_Fab_His Heavy Chain

SEQ ID NO: 27972 - protein, 214 aa, synthetic construct
  REGION 1..214: note = Description of Artificial Sequence: Synthetic polypeptide
  REGION 1..214: note = XENP022105 [ICOS]_H0_L0.17_Fab_His Light Chain
DIQMTQSPSSVSASVGDRVTITCRASQGISRLLAWYQQKPGKAPKLLIYVASSLQSGVPSRFSGSGSGTDFTLTISSLQPEDFATYYCQQAYSFPWTFGQGTKVEIKRTVAAPSVFIFPPSDEQLKSGTASVVCLLNNFYPREAKVQWKVDNALQSGNSQESVTEQDSKDSTYSLSSTLTLSKADYEKHKVYACEVTHQGLSSPVTKSFNRGEC

SEQ ID NO: 27973 - protein, 230 aa, synthetic construct; identical to SEQ ID NO: 27869
  REGION 1..230: note = Description of Artificial Sequence: Synthetic polypeptide
  REGION 1..230: note = XENP022106 [ICOS]_H0_L0.18_Fab_His Heavy Chain

SEQ ID NO: 27974 - protein, 214 aa, synthetic construct
  REGION 1..214: note = Description of Artificial Sequence: Synthetic polypeptide
  REGION 1..214: note = XENP022106 [ICOS]_H0_L0.18_Fab_His Light Chain
DIQMTQSPSSVSASVGDRVTITCRASQGISRLLAWYQQKPGKAPKLLIYVASSLQSGVPSRFSGSGSGTDFTLTISSLQPEDFATYYCQQANTFPWTFGQGTKVEIKRTVAAPSVFIFPPSDEQLKSGTASVVCLLNNFYPREAKVQWKVDNALQSGNSQESVTEQDSKDSTYSLSSTLTLSKADYEKHKVYACEVTHQGLSSPVTKSFNRGEC

SEQ ID NO: 27975 - protein, 230 aa, synthetic construct; identical to SEQ ID NO: 27869
  REGION 1..230: note = Description of Artificial Sequence: Synthetic polypeptide
  REGION 1..230: note = XENP022107 [ICOS]_H0_L0.19_Fab_His Heavy Chain

SEQ ID NO: 27976 - protein, 214 aa, synthetic construct
  REGION 1..214: note = Description of Artificial Sequence: Synthetic polypeptide
  REGION 1..214: note = XENP022107 [ICOS]_H0_L0.19_Fab_His Light Chain
DIQMTQSPSSVSASVGDRVTITCRASQGISRLLAWYQQKPGKAPKLLIYVASSLQSGVPSRFSGSGSGTDFTLTISSLQPEDFATYYCQQANSTPWTFGQGTKVEIKRTVAAPSVFIFPPSDEQLKSGTASVVCLLNNFYPREAKVQWKVDNALQSGNSQESVTEQDSKDSTYSLSSTLTLSKADYEKHKVYACEVTHQGLSSPVTKSFNRGEC

SEQ ID NO: 27977 - protein, 230 aa, synthetic construct; identical to SEQ ID NO: 27869
  REGION 1..230: note = Description of Artificial Sequence: Synthetic polypeptide
  REGION 1..230: note = XENP022108 [ICOS]_H0_L0.20_Fab_His Heavy Chain

SEQ ID NO: 27978 - protein, 214 aa, synthetic construct; identical to SEQ ID NO: 27309
  REGION 1..214: note = Description of Artificial Sequence: Synthetic polypeptide
  REGION 1..214: note = XENP022108 [ICOS]_H0_L0.20_Fab_His Light Chain

SEQ ID NO: 27979 - protein, 230 aa, synthetic construct; identical to SEQ ID NO: 27869
  REGION 1..230: note = Description of Artificial Sequence: Synthetic polypeptide
  REGION 1..230: note = XENP022767 [ICOS]_H0_L0.21_Fab_His Heavy Chain

SEQ ID NO: 27980 - protein, 214 aa, synthetic construct
  REGION 1..214: note = Description of Artificial Sequence: Synthetic polypeptide
  REGION 1..214: note = XENP022767 [ICOS]_H0_L0.21_Fab_His Light Chain
DIQMTQSPSSVSASVGDRVTITCRASQDISSLLAWYQQKPGKAPKLLIYVASSLQSGVPSRFSGSGSGTDFTLTISSLQPEDFATYYCQQANSFPWTFGQGTKVEIKRTVAAPSVFIFPPSDEQLKSGTASVVCLLNNFYPREAKVQWKVDNALQSGNSQESVTEQDSKDSTYSLSSTLTLSKADYEKHKVYACEVTHQGLSSPVTKSFNRGEC

SEQ ID NO: 27981 - protein, 230 aa, synthetic construct; identical to SEQ ID NO: 27869
  REGION 1..230: note = Description of Artificial Sequence: Synthetic polypeptide
  REGION 1..230: note = XENP022768 [ICOS]_H0_L0.22_Fab_His Heavy Chain

SEQ ID NO: 27982 - protein, 214 aa, synthetic construct
  REGION 1..214: note = Description of Artificial Sequence: Synthetic polypeptide
  REGION 1..214: note = XENP022768 [ICOS]_H0_L0.22_Fab_His Light Chain
DIQMTQSPSSVSASVGDRVTITCRASQDISRLLAWYQQKPGKAPKLLIYAASSLQSGVPSRFSGSGSGTDFTLTISSLQPEDFATYYCQQANSFPWTFGQGTKVEIKRTVAAPSVFIFPPSDEQLKSGTASVVCLLNNFYPREAKVQWKVDNALQSGNSQESVTEQDSKDSTYSLSSTLTLSKADYEKHKVYACEVTHQGLSSPVTKSFNRGEC

SEQ ID NO: 27983 - protein, 230 aa, synthetic construct; identical to SEQ ID NO: 27869
  REGION 1..230: note = Description of Artificial Sequence: Synthetic polypeptide
  REGION 1..230: note = XENP022769 [ICOS]_H0_L0.23_Fab_His Heavy Chain

SEQ ID NO: 27984 - protein, 214 aa, synthetic construct
  REGION 1..214: note = Description of Artificial Sequence: Synthetic polypeptide
  REGION 1..214: note = XENP022769 [ICOS]_H0_L0.23_Fab_His Light Chain
DIQMTQSPSSVSASVGDRVTITCRASQDISRLLAWYQQKPGKAPKLLIYVASSLQSGVPSRFSGSGSGTDFTLTISSLQPEDFATYYCQQAESFPWTFGQGTKVEIKRTVAAPSVFIFPPSDEQLKSGTASVVCLLNNFYPREAKVQWKVDNALQSGNSQESVTEQDSKDSTYSLSSTLTLSKADYEKHKVYACEVTHQGLSSPVTKSFNRGEC

SEQ ID NO: 27985 - protein, 230 aa, synthetic construct; identical to SEQ ID NO: 27869
  REGION 1..230: note = Description of Artificial Sequence: Synthetic polypeptide
  REGION 1..230: note = XENP022770 [ICOS]_H0_L0.24_Fab_His Heavy Chain

SEQ ID NO: 27986 - protein, 214 aa, synthetic construct
  REGION 1..214: note = Description of Artificial Sequence: Synthetic polypeptide
  REGION 1..214: note = XENP022770 [ICOS]_H0_L0.24_Fab_His Light Chain
DIQMTQSPSSVSASVGDRVTITCRASQGISSLLAWYQQKPGKAPKLLIYAASSLQSGVPSRFSGSGSGTDFTLTISSLQPEDFATYYCQQANSFPWTFGQGTKVEIKRTVAAPSVFIFPPSDEQLKSGTASVVCLLNNFYPREAKVQWKVDNALQSGNSQESVTEQDSKDSTYSLSSTLTLSKADYEKHKVYACEVTHQGLSSPVTKSFNRGEC

SEQ ID NO: 27987 - protein, 230 aa, synthetic construct; identical to SEQ ID NO: 27869
  REGION 1..230: note = Description of Artificial Sequence: Synthetic polypeptide
  REGION 1..230: note = XENP022771 [ICOS]_H0_L0.25_Fab_His Heavy Chain

SEQ ID NO: 27988 - protein, 214 aa, synthetic construct
  REGION 1..214: note = Description of Artificial Sequence: Synthetic polypeptide
  REGION 1..214: note = XENP022771 [ICOS]_H0_L0.25_Fab_His Light Chain
DIQMTQSPSSVSASVGDRVTITCRASQGISSLLAWYQQKPGKAPKLLIYVASSLQSGVPSRFSGSGSGTDFTLTISSLQPEDFATYYCQQAESFPWTFGQGTKVEIKRTVAAPSVFIFPPSDEQLKSGTASVVCLLNNFYPREAKVQWKVDNALQSGNSQESVTEQDSKDSTYSLSSTLTLSKADYEKHKVYACEVTHQGLSSPVTKSFNRGEC

SEQ ID NO: 27989 - protein, 230 aa, synthetic construct; identical to SEQ ID NO: 27869
  REGION 1..230: note = Description of Artificial Sequence: Synthetic polypeptide
  REGION 1..230: note = XENP022772 [ICOS]_H0_L0.26_Fab_His Heavy Chain

SEQ ID NO: 27990 - protein, 214 aa, synthetic construct
  REGION 1..214: note = Description of Artificial Sequence: Synthetic polypeptide
  REGION 1..214: note = XENP022772 [ICOS]_H0_L0.26_Fab_His Light Chain
DIQMTQSPSSVSASVGDRVTITCRASQGISRLLAWYQQKPGKAPKLLIYAASSLQSGVPSRFSGSGSGTDFTLTISSLQPEDFATYYCQQAESFPWTFGQGTKVEIKRTVAAPSVFIFPPSDEQLKSGTASVVCLLNNFYPREAKVQWKVDNALQSGNSQESVTEQDSKDSTYSLSSTLTLSKADYEKHKVYACEVTHQGLSSPVTKSFNRGEC

SEQ ID NO: 27991 - protein, 230 aa, synthetic construct; identical to SEQ ID NO: 27869
  REGION 1..230: note = Description of Artificial Sequence: Synthetic polypeptide
  REGION 1..230: note = XENP022773 [ICOS]_H0_L0.27_Fab_His Heavy Chain

SEQ ID NO: 27992 - protein, 214 aa, synthetic construct
  REGION 1..214: note = Description of Artificial Sequence: Synthetic polypeptide
  REGION 1..214: note = XENP022773 [ICOS]_H0_L0.27_Fab_His Light Chain
DIQMTQSPSSVSASVGDRVTITCRASQDISSLLAWYQQKPGKAPKLLIYAASSLQSGVPSRFSGSGSGTDFTLTISSLQPEDFATYYCQQANSFPWTFGQGTKVEIKRTVAAPSVFIFPPSDEQLKSGTASVVCLLNNFYPREAKVQWKVDNALQSGNSQESVTEQDSKDSTYSLSSTLTLSKADYEKHKVYACEVTHQGLSSPVTKSFNRGEC

SEQ ID NO: 27993 - protein, 230 aa, synthetic construct; identical to SEQ ID NO: 27869
  REGION 1..230: note = Description of Artificial Sequence: Synthetic polypeptide
  REGION 1..230: note = XENP022774 [ICOS]_H0_L0.28_Fab_His Heavy Chain

SEQ ID NO: 27994 - protein, 214 aa, synthetic construct
  REGION 1..214: note = Description of Artificial Sequence: Synthetic polypeptide
  REGION 1..214: note = XENP022774 [ICOS]_H0_L0.28_Fab_His Light Chain
DIQMTQSPSSVSASVGDRVTITCRASQDISSLLAWYQQKPGKAPKLLIYVASSLQSGVPSRFSGSGSGTDFTLTISSLQPEDFATYYCQQAESFPWTFGQGTKVEIKRTVAAPSVFIFPPSDEQLKSGTASVVCLLNNFYPREAKVQWKVDNALQSGNSQESVTEQDSKDSTYSLSSTLTLSKADYEKHKVYACEVTHQGLSSPVTKSFNRGEC

SEQ ID NO: 27995 - protein, 230 aa, synthetic construct; identical to SEQ ID NO: 27869
  REGION 1..230: note = Description of Artificial Sequence: Synthetic polypeptide
  REGION 1..230: note = XENP022775 [ICOS]_H0_L0.29_Fab_His Heavy Chain

SEQ ID NO: 27996 - protein, 214 aa, synthetic construct
  REGION 1..214: note = Description of Artificial Sequence: Synthetic polypeptide
  REGION 1..214: note = XENP022775 [ICOS]_H0_L0.29_Fab_His Light Chain
DIQMTQSPSSVSASVGDRVTITCRASQDISRLLAWYQQKPGKAPKLLIYAASSLQSGVPSRFSGSGSGTDFTLTISSLQPEDFATYYCQQAESFPWTFGQGTKVEIKRTVAAPSVFIFPPSDEQLKSGTASVVCLLNNFYPREAKVQWKVDNALQSGNSQESVTEQDSKDSTYSLSSTLTLSKADYEKHKVYACEVTHQGLSSPVTKSFNRGEC

SEQ ID NO: 27997 - protein, 230 aa, synthetic construct; identical to SEQ ID NO: 27869
  REGION 1..230: note = Description of Artificial Sequence: Synthetic polypeptide
  REGION 1..230: note = XENP022776 [ICOS]_H0_L0.30_Fab_His Heavy Chain

SEQ ID NO: 27998 - protein, 214 aa, synthetic construct
  REGION 1..214: note = Description of Artificial Sequence: Synthetic polypeptide
  REGION 1..214: note = XENP022776 [ICOS]_H0_L0.30_Fab_His Light Chain
DIQMTQSPSSVSASVGDRVTITCRASQGISSLLAWYQQKPGKAPKLLIYAASSLQSGVPSRFSGSGSGTDFTLTISSLQPEDFATYYCQQAESFPWTFGQGTKVEIKRTVAAPSVFIFPPSDEQLKSGTASVVCLLNNFYPREAKVQWKVDNALQSGNSQESVTEQDSKDSTYSLSSTLTLSKADYEKHKVYACEVTHQGLSSPVTKSFNRGEC

SEQ ID NO: 27999 - protein, 230 aa, synthetic construct; identical to SEQ ID NO: 27869
  REGION 1..230: note = Description of Artificial Sequence: Synthetic polypeptide
  REGION 1..230: note = XENP022777 [ICOS]_H0_L0.31_Fab_His Heavy Chain

SEQ ID NO: 28000 - protein, 214 aa, synthetic construct
  REGION 1..214: note = Description of Artificial Sequence: Synthetic polypeptide
  REGION 1..214: note = XENP022777 [ICOS]_H0_L0.31_Fab_His Light Chain
DIQMTQSPSSVSASVGDRVTITCRASQDISSLLAWYQQKPGKAPKLLIYAASSLQSGVPSRFSGSGSGTDFTLTISSLQPEDFATYYCQQAESFPWTFGQGTKVEIKRTVAAPSVFIFPPSDEQLKSGTASVVCLLNNFYPREAKVQWKVDNALQSGNSQESVTEQDSKDSTYSLSSTLTLSKADYEKHKVYACEVTHQGLSSPVTKSFNRGEC

SEQ ID NO: 28001 - protein, 230 aa, synthetic construct; identical to SEQ ID NO: 27869
  REGION 1..230: note = Description of Artificial Sequence: Synthetic polypeptide
  REGION 1..230: note = XENP022778 [ICOS]_H0_L0.32_Fab_His Heavy Chain

SEQ ID NO: 28002 - protein, 214 aa, synthetic construct
  REGION 1..214: note = Description of Artificial Sequence: Synthetic polypeptide
  REGION 1..214: note = XENP022778 [ICOS]_H0_L0.32_Fab_His Light Chain
DIQMTQSPSSVSASVGDRVTITCQASQDISSLLAWYQQKPGKAPKLLIYVASSLQSGVPSRFSGSGSGTDFTLTISSLQPEDFATYYCQQANSFPWTFGQGTKVEIKRTVAAPSVFIFPPSDEQLKSGTASVVCLLNNFYPREAKVQWKVDNALQSGNSQESVTEQDSKDSTYSLSSTLTLSKADYEKHKVYACEVTHQGLSSPVTKSFNRGEC

SEQ ID NO: 28003 - protein, 230 aa, synthetic construct; identical to SEQ ID NO: 27869
  REGION 1..230: note = Description of Artificial Sequence: Synthetic polypeptide
  REGION 1..230: note = XENP022779 [ICOS]_H0_L0.33_Fab_His Heavy Chain

SEQ ID NO: 28004 - protein, 214 aa, synthetic construct
  REGION 1..214: note = Description of Artificial Sequence: Synthetic polypeptide
  REGION 1..214: note = XENP022779 [ICOS]_H0_L0.33_Fab_His Light Chain
DIQMTQSPSSVSASVGDRVTITCQASQDISRLLAWYQQKPGKAPKLLIYAASSLQSGVPSRFSGSGSGTDFTLTISSLQPEDFATYYCQQANSFPWTFGQGTKVEIKRTVAAPSVFIFPPSDEQLKSGTASVVCLLNNFYPREAKVQWKVDNALQSGNSQESVTEQDSKDSTYSLSSTLTLSKADYEKHKVYACEVTHQGLSSPVTKSFNRGEC

SEQ ID NO: 28005 - protein, 230 aa, synthetic construct; identical to SEQ ID NO: 27869
  REGION 1..230: note = Description of Artificial Sequence: Synthetic polypeptide
  REGION 1..230: note = XENP022780 [ICOS]_H0_L0.34_Fab_His Heavy Chain

SEQ ID NO: 28006 - protein, 214 aa, synthetic construct; identical to SEQ ID NO: 26497
  REGION 1..214: note = Description of Artificial Sequence: Synthetic polypeptide
  REGION 1..214: note = XENP022780 [ICOS]_H0_L0.34_Fab_His Light Chain

SEQ ID NO: 28007 - protein, 230 aa, synthetic construct; identical to SEQ ID NO: 27869
  REGION 1..230: note = Description of Artificial Sequence: Synthetic polypeptide
  REGION 1..230: note = XENP022781 [ICOS]_H0_L0.35_Fab_His Heavy Chain

SEQ ID NO: 28008 - protein, 214 aa, synthetic construct
  REGION 1..214: note = Description of Artificial Sequence: Synthetic polypeptide
  REGION 1..214: note = XENP022781 [ICOS]_H0_L0.35_Fab_His Light Chain
DIQMTQSPSSVSASVGDRVTITCQASQDISSLLAWYQQKPGKAPKLLIYAASSLQSGVPSRFSGSGSGTDFTLTISSLQPEDFATYYCQQANSFPWTFGQGTKVEIKRTVAAPSVFIFPPSDEQLKSGTASVVCLLNNFYPREAKVQWKVDNALQSGNSQESVTEQDSKDSTYSLSSTLTLSKADYEKHKVYACEVTHQGLSSPVTKSFNRGEC

SEQ ID NO: 28009 - protein, 230 aa, synthetic construct; identical to SEQ ID NO: 27869
  REGION 1..230: note = Description of Artificial Sequence: Synthetic polypeptide
  REGION 1..230: note = XENP022782 [ICOS]_H0_L0.36_Fab_His Heavy Chain

SEQ ID NO: 28010 - protein, 214 aa, synthetic construct; identical to SEQ ID NO: 26517
  REGION 1..214: note = Description of Artificial Sequence: Synthetic polypeptide
  REGION 1..214: note = XENP022782 [ICOS]_H0_L0.36_Fab_His Light Chain

SEQ ID NO: 28011 - protein, 230 aa, synthetic construct; identical to SEQ ID NO: 27869
  REGION 1..230: note = Description of Artificial Sequence: Synthetic polypeptide
  REGION 1..230: note = XENP022783 [ICOS]_H0_L0.37_Fab_His Heavy Chain

SEQ ID NO: 28012 - protein, 214 aa, synthetic construct; identical to SEQ ID NO: 26537
  REGION 1..214: note = Description of Artificial Sequence: Synthetic polypeptide
  REGION 1..214: note = XENP022783 [ICOS]_H0_L0.37_Fab_His Light Chain

SEQ ID NO: 28013 - protein, 230 aa, synthetic construct; identical to SEQ ID NO: 27869
  REGION 1..230: note = Description of Artificial Sequence: Synthetic polypeptide
  REGION 1..230: note = XENP022784 [ICOS]_H0_L0.38_Fab_His Heavy Chain

SEQ ID NO: 28014 - protein, 214 aa, synthetic construct; identical to SEQ ID NO: 26557
  REGION 1..214: note = Description of Artificial Sequence: Synthetic polypeptide
  REGION 1..214: note = XENP022784 [ICOS]_H0_L0.38_Fab_His Light Chain

SEQ ID NO: 28015 - protein, 230 aa, synthetic construct; identical to SEQ ID NO: 27869
  REGION 1..230: note = Description of Artificial Sequence: Synthetic polypeptide
  REGION 1..230: note = XENP022860 [ICOS]_H0_L0.42_Fab_His Heavy Chain

SEQ ID NO: 28016 - protein, 214 aa, synthetic construct
  REGION 1..214: note = Description of Artificial Sequence: Synthetic polypeptide
  REGION 1..214: note = XENP022860 [ICOS]_H0_L0.42_Fab_His Light Chain
DIQMTQSPSSVSASVGDRVTITCQASQDISSYLAWYQQKPGKAPKLLIYVASSLQSGVPSRFSGSGSGTDFTLTISSLQPEDFATYYCQQAESFPWTFGQGTKVEIKRTVAAPSVFIFPPSDEQLKSGTASVVCLLNNFYPREAKVQWKVDNALQSGNSQESVTEQDSKDSTYSLSSTLTLSKADYEKHKVYACEVTHQGLSSPVTKSFNRGEC

SEQ ID NO: 28017 - protein, 230 aa, synthetic construct; identical to SEQ ID NO: 27869
  REGION 1..230: note = Description of Artificial Sequence: Synthetic polypeptide
  REGION 1..230: note = XENP022861 [ICOS]_H0_L0.43_Fab_His Heavy Chain

SEQ ID NO: 28018 - protein, 214 aa, synthetic construct
  REGION 1..214: note = Description of Artificial Sequence: Synthetic polypeptide
  REGION 1..214: note = XENP022861 [ICOS]_H0_L0.43_Fab_His Light Chain
DIQMTQSPSSVSASVGDRVTITCQASQDISSYLAWYQQKPGKAPKLLIYAASSLQSGVPSRFSGSGSGTDFTLTISSLQPEDFATYYCQQAESFPWTFGQGTKVEIKRTVAAPSVFIFPPSDEQLKSGTASVVCLLNNFYPREAKVQWKVDNALQSGNSQESVTEQDSKDSTYSLSSTLTLSKADYEKHKVYACEVTHQGLSSPVTKSFNRGEC

SEQ ID NO: 28019 - protein, 230 aa, synthetic construct; identical to SEQ ID NO: 27869
  REGION 1..230: note = Description of Artificial Sequence: Synthetic polypeptide
  REGION 1..230: note = XENP022862 [ICOS]_H0_L0.44_Fab_His Heavy Chain

SEQ ID NO: 28020 - protein, 214 aa, synthetic construct
  REGION 1..214: note = Description of Artificial Sequence: Synthetic polypeptide
  REGION 1..214: note = XENP022862 [ICOS]_H0_L0.44_Fab_His Light Chain
DIQMTQSPSSVSASVGDRVTITCQASQDISSYLAWYQQKPGKAPKLLIYAASSLQSGVPSRFSGSGSGTDFTLTISSLQPEDFATYYCQQANSFPWTFGQGTKVEIKRTVAAPSVFIFPPSDEQLKSGTASVVCLLNNFYPREAKVQWKVDNALQSGNSQESVTEQDSKDSTYSLSSTLTLSKADYEKHKVYACEVTHQGLSSPVTKSFNRGEC

SEQ ID NO: 28021 - protein, 230 aa, synthetic construct
  REGION 1..230: note = Description of Artificial Sequence: Synthetic polypeptide
  REGION 1..230: note = XENP022863 [ICOS]_H0.35_L0.38_Fab_His Heavy Chain
QVQLVQSGAEVKKPGASVKVSCKASGYTFTGYYMHWVRQAPGQGLEWMGWINPHSGGTNYAQKFQGRVTMTRDTSISTAYMELSRLRSDDTAVYYCARTYYYDTSGYYHDAFDVWGQGTMVTVSSASTKGPSVFPLAPSSKSTSGGTAALGCLVKDYFPEPVTVSWNSGALTSGVHTFPAVLQSSGLYSLSSVVTVPSSSLGTQTYICNVNHKPSNTKVDKKVEPKSCGS

SEQ ID NO: 28022 - protein, 214 aa, synthetic construct; identical to SEQ ID NO: 26557
  REGION 1..214: note = Description of Artificial Sequence: Synthetic polypeptide
  REGION 1..214: note = XENP022863 [ICOS]_H0.35_L0.38_Fab_His Light Chain

SEQ ID NO: 28023 - protein, 230 aa, synthetic construct; identical to SEQ ID NO: 28021
  REGION 1..230: note = Description of Artificial Sequence: Synthetic polypeptide
  REGION 1..230: note = XENP022864 [ICOS]_H0.35_L0.42_Fab_His Heavy Chain

SEQ ID NO: 28024 - protein, 214 aa, synthetic construct; identical to SEQ ID NO: 28016
  REGION 1..214: note = Description of Artificial Sequence: Synthetic polypeptide
  REGION 1..214: note = XENP022864 [ICOS]_H0.35_L0.42_Fab_His Light Chain

SEQ ID NO: 28025 - protein, 230 aa, synthetic construct; identical to SEQ ID NO: 28021
  REGION 1..230: note = Description of Artificial Sequence: Synthetic polypeptide
  REGION 1..230: note = XENP022865 [ICOS]_H0.35_L0.43_Fab_His Heavy Chain

SEQ ID NO: 28026 - protein, 214 aa, synthetic construct; identical to SEQ ID NO: 28018
  REGION 1..214: note = Description of Artificial Sequence: Synthetic polypeptide
  REGION 1..214: note = XENP022865 [ICOS]_H0.35_L0.43_Fab_His Light Chain

SEQ ID NO: 28027 - protein, 230 aa, synthetic construct; identical to SEQ ID NO: 28021
  REGION 1..230: note = Description of Artificial Sequence: Synthetic polypeptide
  REGION 1..230: note = XENP022866 [ICOS]_H0.35_L0.44_Fab_His Heavy Chain

SEQ ID NO: 28028 - protein, 214 aa, synthetic construct; identical to SEQ ID NO: 28020
  REGION 1..214: note = Description of Artificial Sequence: Synthetic polypeptide
  REGION 1..214: note = XENP022866 [ICOS]_H0.35_L0.44_Fab_His Light Chain

SEQ ID NO: 28029 - protein, 230 aa, synthetic construct
  REGION 1..230: note = Description of Artificial Sequence: Synthetic polypeptide
  REGION 1..230: note = XENP022867 [ICOS]_H0.61_L0.38_Fab_His Heavy Chain
QVQLVQSGAEVKKPGASVKVSCKASGYTFTGYYMHWVRQAPGQGLEWMGIINPHSGGTNYAQKFQGRVTMTRDTSISTAYMELSRLRSDDTAVYYCARTYYYDTSGYYHDAFDVWGQGTMVTVSSASTKGPSVFPLAPSSKSTSGGTAALGCLVKDYFPEPVTVSWNSGALTSGVHTFPAVLQSSGLYSLSSVVTVPSSSLGTQTYICNVNHKPSNTKVDKKVEPKSCGS

SEQ ID NO: 28030 - protein, 214 aa, synthetic construct; identical to SEQ ID NO: 26557
  REGION 1..214: note = Description of Artificial Sequence: Synthetic polypeptide
  REGION 1..214: note = XENP022867 [ICOS]_H0.61_L0.38_Fab_His Light Chain

SEQ ID NO: 28031 - protein, 230 aa, synthetic construct; identical to SEQ ID NO: 28029
  REGION 1..230: note = Description of Artificial Sequence: Synthetic polypeptide
  REGION 1..230: note = XENP022868 [ICOS]_H0.61_L0.42_Fab_His Heavy Chain

SEQ ID NO: 28032 - protein, 214 aa, synthetic construct; identical to SEQ ID NO: 28016
  REGION 1..214: note = Description of Artificial Sequence: Synthetic polypeptide
  REGION 1..214: note = XENP022868 [ICOS]_H0.61_L0.42_Fab_His Light Chain

SEQ ID NO: 28033 - protein, 230 aa, synthetic construct; identical to SEQ ID NO: 28029
  REGION 1..230: note = Description of Artificial Sequence: Synthetic polypeptide
  REGION 1..230: note = XENP022869 [ICOS]_H0.61_L0.43_Fab_His Heavy Chain

SEQ ID NO: 28034 - protein, 214 aa, synthetic construct; identical to SEQ ID NO: 28018
  REGION 1..214: note = Description of Artificial Sequence: Synthetic polypeptide
  REGION 1..214: note = XENP022869 [ICOS]_H0.61_L0.43_Fab_His Light Chain

SEQ ID NO: 28035 - protein, 230 aa, synthetic construct; identical to SEQ ID NO: 28029
  REGION 1..230: note = Description of Artificial Sequence: Synthetic polypeptide
  REGION 1..230: note = XENP022870 [ICOS]_H0.61_L0.44_Fab_His Heavy Chain

SEQ ID NO: 28036 - protein, 214 aa, synthetic construct; identical to SEQ ID NO: 28020
  REGION 1..214: note = Description of Artificial Sequence: Synthetic polypeptide
  REGION 1..214: note = XENP022870 [ICOS]_H0.61_L0.44_Fab_His Light Chain

SEQ ID NO: 28037 - protein, 230 aa, synthetic construct; identical to SEQ ID NO: 27917
  REGION 1..230: note = Description of Artificial Sequence: Synthetic polypeptide
  REGION 1..230: note = XENP022871 [ICOS]_H0.24_L0.38_Fab_His Heavy Chain

SEQ ID NO: 28038 - protein, 214 aa, synthetic construct; identical to SEQ ID NO: 26557
  REGION 1..214: note = Description of Artificial Sequence: Synthetic polypeptide
  REGION 1..214: note = XENP022871 [ICOS]_H0.24_L0.38_Fab_His Light Chain

SEQ ID NO: 28039 - protein, 230 aa, synthetic construct
  REGION 1..230: note = Description of Artificial Sequence: Synthetic polypeptide
  REGION 1..230: note = XENP022872 [ICOS]_H0.37_L0.38_Fab_His Heavy Chain
QVQLVQSGAEVKKPGASVKVSCKASGYTFTGYYMHWVRQAPGQGLEWMGWINPHSGGTNYAQKFQGRVTMTRDTSISTAYMELSSLRSEDTAVYYCARTYYYDTSGYYHDAFDVWGQGTMVTVSSASTKGPSVFPLAPSSKSTSGGTAALGCLVKDYFPEPVTVSWNSGALTSGVHTFPAVLQSSGLYSLSSVVTVPSSSLGTQTYICNVNHKPSNTKVDKKVEPKSCGS

SEQ ID NO: 28040 - protein, 214 aa, synthetic construct; identical to SEQ ID NO: 26557
  REGION 1..214: note = Description of Artificial Sequence: Synthetic polypeptide
  REGION 1..214: note = XENP022872 [ICOS]_H0.37_L0.38_Fab_His Light Chain

SEQ ID NO: 28041 - protein, 230 aa, synthetic construct
  REGION 1..230: note = Description of Artificial Sequence: Synthetic polypeptide
  REGION 1..230: note = XENP022873 [ICOS]_H0.40_L0.38_Fab_His Heavy Chain
QVQLVQSGAEVKKPGASVKVSCKASGYTFTGYYMHWVRQAPGQGLEWMGWINPHSGETNYAQKFQGRVTMTRDTSISTAYMELSSLRSEDTAVYYCARTYYYDTSGYYHDAFDVWGQGTMVTVSSASTKGPSVFPLAPSSKSTSGGTAALGCLVKDYFPEPVTVSWNSGALTSGVHTFPAVLQSSGLYSLSSVVTVPSSSLGTQTYICNVNHKPSNTKVDKKVEPKSCGS

SEQ ID NO: 28042 - protein, 214 aa, synthetic construct; identical to SEQ ID NO: 26557
  REGION 1..214: note = Description of Artificial Sequence: Synthetic polypeptide
  REGION 1..214: note = XENP022873 [ICOS]_H0.40_L0.38_Fab_His Light Chain

SEQ ID NO: 28043 - protein, 230 aa, synthetic construct
  REGION 1..230: note = Description of Artificial Sequence: Synthetic polypeptide
  REGION 1..230: note = XENP022874 [ICOS]_H0.44_L0.38_Fab_His Heavy Chain
QVQLVQSGAEVKKPGASVKVSCKASGYTFTGYYMHWVRQAPGQGLEWMGWINPHSGGTNYAQKFQGRVTITADESTSTAYMELSRLRSDDTAVYYCARTYYYDTSGYYHDAFDVWGQGTMVTVSSASTKGPSVFPLAPSSKSTSGGTAALGCLVKDYFPEPVTVSWNSGALTSGVHTFPAVLQSSGLYSLSSVVTVPSSSLGTQTYICNVNHKPSNTKVDKKVEPKSCGS

SEQ ID NO: 28044 - protein, 214 aa, synthetic construct; identical to SEQ ID NO: 26557
  REGION 1..214: note = Description of Artificial Sequence: Synthetic polypeptide
  REGION 1..214: note = XENP022874 [ICOS]_H0.44_L0.38_Fab_His Light Chain

SEQ ID NO: 28045 - protein, 230 aa, synthetic construct
  REGION 1..230: note = Description of Artificial Sequence: Synthetic polypeptide
  REGION 1..230: note = XENP022875 [ICOS]_H0.56_L0.38_Fab_His Heavy Chain
QVQLVQSGAEVKKPGASVKVSCKASGYTFTGYYMHWVRQAPGQGLEWMGIINPHSGGTNYAQKFQGRVTMTRDTSISTAYMELSRLRSDDTAVYYCARTYYYDTSGYYHDAFDIWGQGTMVTVSSASTKGPSVFPLAPSSKSTSGGTAALGCLVKDYFPEPVTVSWNSGALTSGVHTFPAVLQSSGLYSLSSVVTVPSSSLGTQTYICNVNHKPSNTKVDKKVEPKSCGS

SEQ ID NO: 28046 - protein, 214 aa, synthetic construct; identical to SEQ ID NO: 26557
  REGION 1..214: note = Description of Artificial Sequence: Synthetic polypeptide
  REGION 1..214: note = XENP022875 [ICOS]_H0.56_L0.38_Fab_His Light Chain

SEQ ID NO: 28047 - protein, 230 aa, synthetic construct
  REGION 1..230: note = Description of Artificial Sequence: Synthetic polypeptide
  REGION 1..230: note = XENP022876 [ICOS]_H0.62_L0.38_Fab_His Heavy Chain
QVQLVQSGAEVKKPGASVKVSCKASGYTFTGYYMHWVRQAPGQGLEWMGWINPHSGGTNYAQKFQGRVTMTEDTSTDTAYMELSRLRSDDTAVYYCARTYYYDTSGYYHDAFDVWGQGTMVTVSSASTKGPSVFPLAPSSKSTSGGTAALGCLVKDYFPEPVTVSWNSGALTSGVHTFPAVLQSSGLYSLSSVVTVPSSSLGTQTYICNVNHKPSNTKVDKKVEPKSCGS

SEQ ID NO: 28048 - protein, 214 aa, synthetic construct; identical to SEQ ID NO: 26557
  REGION 1..214: note = Description of Artificial Sequence: Synthetic polypeptide
  REGION 1..214: note = XENP022876 [ICOS]_H0.62_L0.38_Fab_His Light Chain

SEQ ID NO: 28049 - protein, 230 aa, synthetic construct; identical to SEQ ID NO: 28021
  REGION 1..230: note = Description of Artificial Sequence: Synthetic polypeptide
  REGION 1..230: note = XENP022929 [ICOS]_H0.35_L0.36_Fab_His Heavy Chain

SEQ ID NO: 28050 - protein, 214 aa, synthetic construct; identical to SEQ ID NO: 26517
  REGION 1..214: note = Description of Artificial Sequence: Synthetic polypeptide
  REGION 1..214: note = XENP022929 [ICOS]_H0.35_L0.36_Fab_His Light Chain

SEQ ID NO: 28051 - protein, 230 aa, synthetic construct; identical to SEQ ID NO: 28029
  REGION 1..230: note = Description of Artificial Sequence: Synthetic polypeptide
  REGION 1..230: note = XENP022930 [ICOS]_H0.61_L0.36_Fab_His Heavy Chain

SEQ ID NO: 28052 - protein, 214 aa, synthetic construct; identical to SEQ ID NO: 26517
  REGION 1..214: note = Description of Artificial Sequence: Synthetic polypeptide
  REGION 1..214: note = XENP022930 [ICOS]_H0.61_L0.36_Fab_His Light Chain

SEQ ID NO: 28053 - protein, 230 aa, synthetic construct; identical to SEQ ID NO: 27917
  REGION 1..230: note = Description of Artificial Sequence: Synthetic polypeptide
  REGION 1..230: note = XENP022938 [ICOS]_H0.24_L0.37_Fab_His Heavy Chain

SEQ ID NO: 28054 - protein, 214 aa, synthetic construct; identical to SEQ ID NO: 26537
  REGION 1..214: note = Description of Artificial Sequence: Synthetic polypeptide
  REGION 1..214: note = XENP022938 [ICOS]_H0.24_L0.37_Fab_His Light Chain

SEQ ID NO: 28055 - protein, 230 aa, synthetic construct; identical to SEQ ID NO: 28039
  REGION 1..230: note = Description of Artificial Sequence: Synthetic polypeptide
  REGION 1..230: note = XENP022939 [ICOS]_H0.37_L0.37_Fab_His Heavy Chain

SEQ ID NO: 28056 - protein, 214 aa, synthetic construct; identical to SEQ ID NO: 26537
  REGION 1..214: note = Description of Artificial Sequence: Synthetic polypeptide
  REGION 1..214: note = XENP022939 [ICOS]_H0.37_L0.37_Fab_His Light Chain

SEQ ID NO: 28057 - protein, 230 aa, synthetic construct; identical to SEQ ID NO: 28041
  REGION 1..230: note = Description of Artificial Sequence: Synthetic polypeptide
  REGION 1..230: note = XENP022940 [ICOS]_H0.40_L0.37_Fab_His Heavy Chain

SEQ ID NO: 28058 - protein, 214 aa, synthetic construct; identical to SEQ ID NO: 26537
  REGION 1..214: note = Description of Artificial Sequence: Synthetic polypeptide
  REGION 1..214: note = XENP022940 [ICOS]_H0.40_L0.37_Fab_His Light Chain

SEQ ID NO: 28059 - protein, 230 aa, synthetic construct; identical to SEQ ID NO: 28043
  REGION 1..230: note = Description of Artificial Sequence: Synthetic polypeptide
  REGION 1..230: note = XENP022941 [ICOS]_H0.44_L0.37_Fab_His Heavy Chain

SEQ ID NO: 28060 - protein, 214 aa, synthetic construct; identical to SEQ ID NO: 26537
  REGION 1..214: note = Description of Artificial Sequence: Synthetic polypeptide
  REGION 1..214: note = XENP022941 [ICOS]_H0.44_L0.37_Fab_His Light Chain

SEQ ID NO: 28061 - protein, 230 aa, synthetic construct; identical to SEQ ID NO: 28045
  REGION 1..230: note = Description of Artificial Sequence: Synthetic polypeptide
  REGION 1..230: note = XENP022942 [ICOS]_H0.56_L0.37_Fab_His Heavy Chain

SEQ ID NO: 28062 - protein, 214 aa, synthetic construct; identical to SEQ ID NO: 26537
  REGION 1..214: note = Description of Artificial Sequence: Synthetic polypeptide
  REGION 1..214: note = XENP022942 [ICOS]_H0.56_L0.37_Fab_His Light Chain

SEQ ID NO: 28063 - protein, 230 aa, synthetic construct; identical to SEQ ID NO: 28047
  REGION 1..230: note = Description of Artificial Sequence: Synthetic polypeptide
  REGION 1..230: note = XENP022943 [ICOS]_H0.62_L0.37_Fab_His Heavy Chain

SEQ ID NO: 28064 - protein, 214 aa, synthetic construct; identical to SEQ ID NO: 26537
  REGION 1..214: note = Description of Artificial Sequence: Synthetic polypeptide
  REGION 1..214: note = XENP022943 [ICOS]_H0.62_L0.37_Fab_His Light Chain

SEQ ID NO: 28065 - protein, 230 aa, synthetic construct; identical to SEQ ID NO: 28021
  REGION 1..230: note = Description of Artificial Sequence: Synthetic polypeptide
  REGION 1..230: note = XENP022944 [ICOS]_H0.35_L0.34_Fab_His Heavy Chain

SEQ ID NO: 28066 - protein, 214 aa, synthetic construct; identical to SEQ ID NO: 26497
  REGION 1..214: note = Description of Artificial Sequence: Synthetic polypeptide
  REGION 1..214: note = XENP022944 [ICOS]_H0.35_L0.34_Fab_His Light Chain

SEQ ID NO: 28067 - protein, 230 aa, synthetic construct; identical to SEQ ID NO: 28021
  REGION 1..230: note = Description of Artificial Sequence: Synthetic polypeptide
  REGION 1..230: note = XENP022945 [ICOS]_H0.35_L0.35_Fab_His Heavy Chain

SEQ ID NO: 28068 - protein, 214 aa, synthetic construct; identical to SEQ ID NO: 28008
  REGION 1..214: note = Description of Artificial Sequence: Synthetic polypeptide
  REGION 1..214: note = XENP022945 [ICOS]_H0.35_L0.35_Fab_His Light Chain

SEQ ID NO: 28069 - protein, 230 aa, synthetic construct; identical to SEQ ID NO: 28021
  REGION 1..230: note = Description of Artificial Sequence: Synthetic polypeptide
  REGION 1..230: note = XENP022946 [ICOS]_H0.35_L0.37_Fab_His Heavy Chain

SEQ ID NO: 28070 - protein, 214 aa, synthetic construct; identical to SEQ ID NO: 26537
  REGION 1..214: note = Description of Artificial Sequence: Synthetic polypeptide
  REGION 1..214: note = XENP022946 [ICOS]_H0.35_L0.37_Fab_His Light Chain

SEQ ID NO: 28071 - protein, 230 aa, synthetic construct; identical to SEQ ID NO: 28029
  REGION 1..230: note = Description of Artificial Sequence: Synthetic polypeptide
  REGION 1..230: note = XENP022947 [ICOS]_H0.61_L0.34_Fab_His Heavy Chain

SEQ ID NO: 28072 - protein, 214 aa, synthetic construct; identical to SEQ ID NO: 26497
  REGION 1..214: note = Description of Artificial Sequence: Synthetic polypeptide
  REGION 1..214: note = XENP022947 [ICOS]_H0.61_L0.34_Fab_His Light Chain

SEQ ID NO: 28073 - protein, 230 aa, synthetic construct; identical to SEQ ID NO: 28029
  REGION 1..230: note = Description of Artificial Sequence: Synthetic polypeptide
  REGION 1..230: note = XENP022948 [ICOS]_H0.61_L0.35_Fab_His Heavy Chain

SEQ ID NO: 28074 - protein, 214 aa, synthetic construct; identical to SEQ ID NO: 28008
  REGION 1..214: note = Description of Artificial Sequence: Synthetic polypeptide
  REGION 1..214: note = XENP022948 [ICOS]_H0.61_L0.35_Fab_His Light Chain

SEQ ID NO: 28075 - protein, 230 aa, synthetic construct; identical to SEQ ID NO: 28029
  REGION 1..230: note = Description of Artificial Sequence: Synthetic polypeptide
  REGION 1..230: note = XENP022949 [ICOS]_H0.61_L0.37_Fab_His Heavy Chain

SEQ ID NO: 28076 - protein, 214 aa, synthetic construct; identical to SEQ ID NO: 26537
  REGION 1..214: note = Description of Artificial Sequence: Synthetic polypeptide
  REGION 1..214: note = XENP022949 [ICOS]_H0.61_L0.37_Fab_His Light Chain

SEQ ID NO: 28077 - protein, 230 aa, synthetic construct; identical to SEQ ID NO: 28039
  REGION 1..230: note = Description of Artificial Sequence: Synthetic polypeptide
  REGION 1..230: note = XENP023086 [ICOS]_H0.37_L0_Fab_His Heavy Chain

SEQ ID NO: 28078 - protein, 214 aa, synthetic construct; identical to SEQ ID NO: 26297
  REGION 1..214: note = Description of Artificial Sequence: Synthetic polypeptide
  REGION 1..214: note = XENP023086 [ICOS]_H0.37_L0_Fab_His Light Chain

SEQ ID NO: 28079 - protein, 230 aa, synthetic construct
  REGION 1..230: note = Description of Artificial Sequence: Synthetic polypeptide
  REGION 1..230: note = XENP023087 [ICOS]_H0.64_L0_Fab_His Heavy Chain
QVQLVQSGAEVKKPGASVKVSCKASGYTFTGYYMHWVRQAPGQGLEWMGWINPHSGGTNYAQKFQGRVTMTEDTSTDTAYMELSSLRSEDTAVYYCARTYYYDTSGYYHDAFDVWGQGTMVTVSSASTKGPSVFPLAPSSKSTSGGTAALGCLVKDYFPEPVTVSWNSGALTSGVHTFPAVLQSSGLYSLSSVVTVPSSSLGTQTYICNVNHKPSNTKVDKKVEPKSCGS

SEQ ID NO: 28080 - protein, 214 aa, synthetic construct; identical to SEQ ID NO: 26297
  REGION 1..214: note = Description of Artificial Sequence: Synthetic polypeptide
  REGION 1..214: note = XENP023087 [ICOS]_H0.64_L0_Fab_His Light Chain

SEQ ID NO: 28081 - protein, 230 aa, synthetic construct
  REGION 1..230: note = Description of Artificial Sequence: Synthetic polypeptide
  REGION 1..230: note = XENP023088 [ICOS]_H0.66_L0_Fab_His Heavy Chain
QVQLVQSGAEVKKPGASVKVSCKASGYTFTGYYMHWVRQAPGQGLEWMGWINPHSGETIYAQKFQGRVTMTRDTSISTAYMELSSLRSEDTAVYYCARTYYYDTSGYYHDAFDVWGQGTMVTVSSASTKGPSVFPLAPSSKSTSGGTAALGCLVKDYFPEPVTVSWNSGALTSGVHTFPAVLQSSGLYSLSSVVTVPSSSLGTQTYICNVNHKPSNTKVDKKVEPKSCGS

SEQ ID NO: 28082 - protein, 214 aa, synthetic construct; identical to SEQ ID NO: 26297
  REGION 1..214: note = Description of Artificial Sequence: Synthetic polypeptide
  REGION 1..214: note = XENP023088 [ICOS]_H0.66_L0_Fab_His Light Chain

SEQ ID NO: 28083 - protein, 230 aa, synthetic construct
  REGION 1..230: note = Description of Artificial Sequence: Synthetic polypeptide
  REGION 1..230: note = XENP023089 [ICOS]_H0.67_L0_Fab_His Heavy Chain
QVQLVQSGAEVKKPGASVKVSCKASGYTFTGYYMHWVRQAPGQGLEWMGWINPHSGETIYAQKFQGRVTMTEDTSTDTAYMELSSLRSEDTAVYYCARTYYYDTSGYYHDAFDVWGQGTMVTVSSASTKGPSVFPLAPSSKSTSGGTAALGCLVKDYFPEPVTVSWNSGALTSGVHTFPAVLQSSGLYSLSSVVTVPSSSLGTQTYICNVNHKPSNTKVDKKVEPKSCGS

SEQ ID NO: 28084 - protein, 214 aa, synthetic construct; identical to SEQ ID NO: 26297
  REGION 1..214: note = Description of Artificial Sequence: Synthetic polypeptide
  REGION 1..214: note = XENP023089 [ICOS]_H0.67_L0_Fab_His Light Chain

SEQ ID NO: 28085 - protein, 230 aa, synthetic construct; identical to SEQ ID NO: 28081
  REGION 1..230: note = Description of Artificial Sequence: Synthetic polypeptide
  REGION 1..230: note = XENP023409 [ICOS]_H0.66_L0.34_Fab_His Heavy Chain

SEQ ID NO: 28086 - protein, 214 aa, synthetic construct; identical to SEQ ID NO: 26497
  REGION 1..214: note = Description of Artificial Sequence: Synthetic polypeptide
  REGION 1..214: note = XENP023409 [ICOS]_H0.66_L0.34_Fab_His Light Chain

SEQ ID NO: 28087 - protein, 454 aa, synthetic construct; identical to SEQ ID NO: 26442
  REGION 1..454: note = Description of Artificial Sequence: Synthetic polypeptide
  REGION 1..454: note = XENP020266 [ICOS]_H0L0 one-arm mAb Fab-Fc Heavy Chain

SEQ ID NO: 28088 - protein, 231 aa, synthetic construct; identical to SEQ ID NO: 27198
  REGION 1..231: note = Description of Artificial Sequence: Synthetic polypeptide
  REGION 1..231: note = XENP020266 [ICOS]_H0L0 one-arm mAb Fc-only Heavy Chain

SEQ ID NO: 28089 - protein, 214 aa, synthetic construct; identical to SEQ ID NO: 26297
  REGION 1..214: note = Description of Artificial Sequence: Synthetic polypeptide
  REGION 1..214: note = XENP020266 [ICOS]_H0L0 one-arm mAb Light Chain

SEQ ID NO: 28090 - protein, 454 aa, synthetic construct; identical to SEQ ID NO: 26442
  REGION 1..454: note = Description of Artificial Sequence: Synthetic polypeptide
  REGION 1..454: note = XENP022439 [ICOS]_H0_L0.5 one-arm mAb Fab-Fc Heavy Chain

SEQ ID NO: 28091 - protein, 231 aa, synthetic construct; identical to SEQ ID NO: 27198
  REGION 1..231: note = Description of Artificial Sequence: Synthetic polypeptide
  REGION 1..231: note = XENP022439 [ICOS]_H0_L0.5 one-arm mAb Fc-only Heavy Chain

SEQ ID NO: 28092 - protein, 214 aa, synthetic construct; identical to SEQ ID NO: 27243
  REGION 1..214: note = Description of Artificial Sequence: Synthetic polypeptide
  REGION 1..214: note = XENP022439 [ICOS]_H0_L0.5 one-arm mAb Light Chain

SEQ ID NO: 28093 - protein, 454 aa, synthetic construct; identical to SEQ ID NO: 26442
  REGION 1..454: note = Description of Artificial Sequence: Synthetic polypeptide
  REGION 1..454: note = XENP022440 [ICOS]_H0_L0.7 one-arm mAb Fab-Fc Heavy Chain

SEQ ID NO: 28094 - protein, 231 aa, synthetic construct; identical to SEQ ID NO: 27198
  REGION 1..231: note = Description of Artificial Sequence: Synthetic polypeptide
  REGION 1..231: note = XENP022440 [ICOS]_H0_L0.7 one-arm mAb Fc-only Heavy Chain

SEQ ID NO: 28095 - protein, 214 aa, synthetic construct; identical to SEQ ID NO: 26477
  REGION 1..214: note = Description of Artificial Sequence: Synthetic polypeptide
  REGION 1..214: note = XENP022440 [ICOS]_H0_L0.7 one-arm mAb Light Chain

SEQ ID NO: 28096 - protein, 454 aa, synthetic construct; identical to SEQ ID NO: 26442
  REGION 1..454: note = Description of Artificial Sequence: Synthetic polypeptide
  REGION 1..454: note = XENP022441 [ICOS]_H0_L0.9 one-arm mAb Fab-Fc Heavy Chain

SEQ ID NO: 28097 - protein, 231 aa, synthetic construct; identical to SEQ ID NO: 27198
  REGION 1..231: note = Description of Artificial Sequence: Synthetic polypeptide
  REGION 1..231: note = XENP022441 [ICOS]_H0_L0.9 one-arm mAb Fc-only Heavy Chain

SEQ ID NO: 28098 - protein, 214 aa, synthetic construct; identical to SEQ ID NO: 27265
  REGION 1..214: note = Description of Artificial Sequence: Synthetic polypeptide
  REGION 1..214: note = XENP022441 [ICOS]_H0_L0.9 one-arm mAb Light Chain

SEQ ID NO: 28099 - protein, 454 aa, synthetic construct; identical to SEQ ID NO: 26442
  REGION 1..454: note = Description of Artificial Sequence: Synthetic polypeptide
  REGION 1..454: note = XENP022442 [ICOS]_H0_L0.10 one-arm mAb Fab-Fc Heavy Chain

SEQ ID NO: 28100 - protein, 231 aa, synthetic construct; identical to SEQ ID NO: 27198
  REGION 1..231: note = Description of Artificial Sequence: Synthetic polypeptide
  REGION 1..231: note = XENP022442 [ICOS]_H0_L0.10 one-arm mAb Fc-only Heavy Chain

SEQ ID NO: 28101 - protein, 214 aa, synthetic construct; identical to SEQ ID NO: 27276
  REGION 1..214: note = Description of Artificial Sequence: Synthetic polypeptide
  REGION 1..214: note = XENP022442 [ICOS]_H0_L0.10 one-arm mAb Light Chain

SEQ ID NO: 28102 - protein, 454 aa, synthetic construct; identical to SEQ ID NO: 26442
  REGION 1..454: note = Description of Artificial Sequence: Synthetic polypeptide
  REGION 1..454: note = XENP022443 [ICOS]_H0_L0.14 one-arm mAb Fab-Fc Heavy Chain

SEQ ID NO: 28103 - protein, 231 aa, synthetic construct; identical to SEQ ID NO: 27198
  REGION 1..231: note = Description of Artificial Sequence: Synthetic polypeptide
  REGION 1..231: note = XENP022443 [ICOS]_H0_L0.14 one-arm mAb Fc-only Heavy Chain

SEQ ID NO: 28104 - protein, 214 aa, synthetic construct; identical to SEQ ID NO: 27287
  REGION 1..214: note = Description of Artificial Sequence: Synthetic polypeptide
  REGION 1..214: note = XENP022443 [ICOS]_H0_L0.14 one-arm mAb Light Chain

SEQ ID NO: 28105 - protein, 454 aa, synthetic construct; identical to SEQ ID NO: 26442
  REGION 1..454: note = Description of Artificial Sequence: Synthetic polypeptide
  REGION 1..454: note = XENP022444 [ICOS]_H0_L0.15 one-arm mAb Fab-Fc Heavy Chain

SEQ ID NO: 28106 - protein, 231 aa, synthetic construct; identical to SEQ ID NO: 27198
  REGION 1..231: note = Description of Artificial Sequence: Synthetic polypeptide
  REGION 1..231: note = XENP022444 [ICOS]_H0_L0.15 one-arm mAb Fc-only Heavy Chain

SEQ ID NO: 28107 - protein, 214 aa, synthetic construct; identical to SEQ ID NO: 27298
  REGION 1..214: note = Description of Artificial Sequence: Synthetic polypeptide
  REGION 1..214: note = XENP022444 [ICOS]_H0_L0.15 one-arm mAb Light Chain

SEQ ID NO: 28108 - protein, 454 aa, synthetic construct; identical to SEQ ID NO: 26442
  REGION 1..454: note = Description of Artificial Sequence: Synthetic polypeptide
  REGION 1..454: note = XENP022445 [ICOS]_H0_L0.20 one-arm mAb Fab-Fc Heavy Chain

SEQ ID NO: 28109 - protein, 231 aa, synthetic construct; identical to SEQ ID NO: 27198
  REGION 1..231: note = Description of Artificial Sequence: Synthetic polypeptide
  REGION 1..231: note = XENP022445 [ICOS]_H0_L0.20 one-arm mAb Fc-only Heavy Chain

SEQ ID NO: 28110 - protein, 214 aa, synthetic construct; identical to SEQ ID NO: 27309
  REGION 1..214: note = Description of Artificial Sequence: Synthetic polypeptide
  REGION 1..214: note = XENP022445 [ICOS]_H0_L0.20 one-arm mAb Light Chain

SEQ ID NO: 28111 - protein, 454 aa, synthetic construct; identical to SEQ ID NO: 26442
  REGION 1..454: note = Description of Artificial Sequence: Synthetic polypeptide
  REGION 1..454: note = XENP022749 [ICOS]_H0_L0.21 one-arm mAb Fab-Fc Heavy Chain

SEQ ID NO: 28112 - protein, 231 aa, synthetic construct; identical to SEQ ID NO: 27198
  REGION 1..231: note = Description of Artificial Sequence: Synthetic polypeptide
  REGION 1..231: note = XENP022749 [ICOS]_H0_L0.21 one-arm mAb Fc-only Heavy Chain

SEQ ID NO: 28113 - protein, 214 aa, synthetic construct; identical to SEQ ID NO: 27980
  REGION 1..214: note = Description of Artificial Sequence: Synthetic polypeptide
  REGION 1..214: note = XENP022749 [ICOS]_H0_L0.21 one-arm mAb Light Chain

SEQ ID NO: 28114 - protein, 454 aa, synthetic construct; identical to SEQ ID NO: 26442
  REGION 1..454: note = Description of Artificial Sequence: Synthetic polypeptide
  REGION 1..454: note = XENP022750 [ICOS]_H0_L0.22 one-arm mAb Fab-Fc Heavy Chain

SEQ ID NO: 28115 - protein, 231 aa, synthetic construct; identical to SEQ ID NO: 27198
  REGION 1..231: note = Description of Artificial Sequence: Synthetic polypeptide
  REGION 1..231: note = XENP022750 [ICOS]_H0_L0.22 one-arm mAb Fc-only Heavy Chain

SEQ ID NO: 28116 - protein, 214 aa, synthetic construct; identical to SEQ ID NO: 27982
  REGION 1..214: note = Description of Artificial Sequence: Synthetic polypeptide
  REGION 1..214: note = XENP022750 [ICOS]_H0_L0.22 one-arm mAb Light Chain

SEQ ID NO: 28117 - protein, 454 aa, synthetic construct; identical to SEQ ID NO: 26442
  REGION 1..454: note = Description of Artificial Sequence: Synthetic polypeptide
  REGION 1..454: note = XENP022751 [ICOS]_H0_L0.23 one-arm mAb Fab-Fc Heavy Chain

SEQ ID NO: 28118 - protein, 231 aa, synthetic construct; identical to SEQ ID NO: 27198
  REGION 1..231: note = Description of Artificial Sequence: Synthetic polypeptide
  REGION 1..231: note = XENP022751 [ICOS]_H0_L0.23 one-arm mAb Fc-only Heavy Chain

SEQ ID NO: 28119 - protein, 214 aa, synthetic construct; identical to SEQ ID NO: 27984
  REGION 1..214: note = Description of Artificial Sequence: Synthetic polypeptide
  REGION 1..214: note = XENP022751 [ICOS]_H0_L0.23 one-arm mAb Light Chain

SEQ ID NO: 28120 - protein, 454 aa, synthetic construct; identical to SEQ ID NO: 26442
  REGION 1..454: note = Description of Artificial Sequence: Synthetic polypeptide
  REGION 1..454: note = XENP022752 [ICOS]_H0_L0.24 one-arm mAb Fab-Fc Heavy Chain

SEQ ID NO: 28121 - protein, 231 aa, synthetic construct; identical to SEQ ID NO: 27198
  REGION 1..231: note = Description of Artificial Sequence: Synthetic polypeptide
  REGION 1..231: note = XENP022752 [ICOS]_H0_L0.24 one-arm mAb Fc-only Heavy Chain

SEQ ID NO: 28122 - protein, 214 aa, synthetic construct; identical to SEQ ID NO: 27986
  REGION 1..214: note = Description of Artificial Sequence: Synthetic polypeptide
  REGION 1..214: note = XENP022752 [ICOS]_H0_L0.24 one-arm mAb Light Chain

SEQ ID NO: 28123 - protein, 454 aa, synthetic construct; identical to SEQ ID NO: 26442
  REGION 1..454: note = Description of Artificial Sequence: Synthetic polypeptide
  REGION 1..454: note = XENP022753 [ICOS]_H0_L0.25 one-arm mAb Fab-Fc Heavy Chain

SEQ ID NO: 28124 - protein, 231 aa, synthetic construct; identical to SEQ ID NO: 27198
  REGION 1..231: note = Description of Artificial Sequence: Synthetic polypeptide
  REGION 1..231: note = XENP022753 [ICOS]_H0_L0.25 one-arm mAb Fc-only Heavy Chain

SEQ ID NO: 28125 - protein, 214 aa, synthetic construct; identical to SEQ ID NO: 27988
  REGION 1..214: note = Description of Artificial Sequence: Synthetic polypeptide
  REGION 1..214: note = XENP022753 [ICOS]_H0_L0.25 one-arm mAb Light Chain

SEQ ID NO: 28126 - protein, 454 aa, synthetic construct; identical to SEQ ID NO: 26442
  REGION 1..454: note = Description of Artificial Sequence: Synthetic polypeptide
  REGION 1..454: note = XENP022754 [ICOS]_H0_L0.26 one-arm mAb Fab-Fc Heavy Chain

SEQ ID NO: 28127 - protein, 231 aa, synthetic construct; identical to SEQ ID NO: 27198
  REGION 1..231: note = Description of Artificial Sequence: Synthetic polypeptide
  REGION 1..231: note = XENP022754 [ICOS]_H0_L0.26 one-arm mAb Fc-only Heavy Chain

SEQ ID NO: 28128 - protein, 214 aa, synthetic construct; identical to SEQ ID NO: 27990
  REGION 1..214: note = Description of Artificial Sequence: Synthetic polypeptide
  REGION 1..214: note = XENP022754 [ICOS]_H0_L0.26 one-arm mAb Light Chain

SEQ ID NO: 28129 - protein, 454 aa, synthetic construct; identical to SEQ ID NO: 26442
  REGION 1..454: note = Description of Artificial Sequence: Synthetic polypeptide
  REGION 1..454: note = XENP022755 [ICOS]_H0_L0.27 one-arm mAb Fab-Fc Heavy Chain

SEQ ID NO: 28130 - protein, 231 aa, synthetic construct; identical to SEQ ID NO: 27198
  REGION 1..231: note = Description of Artificial Sequence: Synthetic polypeptide
  REGION 1..231: note = XENP022755 [ICOS]_H0_L0.27 one-arm mAb Fc-only Heavy Chain

SEQ ID NO: 28131 - protein, 214 aa, synthetic construct; identical to SEQ ID NO: 27992
  REGION 1..214: note = Description of Artificial Sequence: Synthetic polypeptide
  REGION 1..214: note = XENP022755 [ICOS]_H0_L0.27 one-arm mAb Light Chain

SEQ ID NO: 28132 - protein, 454 aa, synthetic construct; identical to SEQ ID NO: 26442
  REGION 1..454: note = Description of Artificial Sequence: Synthetic polypeptide
  REGION 1..454: note = XENP022756 [ICOS]_H0_L0.28 one-arm mAb Fab-Fc Heavy Chain

SEQ ID NO: 28133 - protein, 231 aa, synthetic construct; identical to SEQ ID NO: 27198
  REGION 1..231: note = Description of Artificial Sequence: Synthetic polypeptide
  REGION 1..231: note = XENP022756 [ICOS]_H0_L0.28 one-arm mAb Fc-only Heavy Chain

SEQ ID NO: 28134 - protein, 214 aa, synthetic construct; identical to SEQ ID NO: 27994
  REGION 1..214: note = Description of Artificial Sequence: Synthetic polypeptide
  REGION 1..214: note = XENP022756 [ICOS]_H0_L0.28 one-arm mAb Light Chain

SEQ ID NO: 28135 - protein, 454 aa, synthetic construct; identical to SEQ ID NO: 26442
  REGION 1..454: note = Description of Artificial Sequence: Synthetic polypeptide
  REGION 1..454: note = XENP022757 [ICOS]_H0_L0.29 one-arm mAb Fab-Fc Heavy Chain

SEQ ID NO: 28136 - protein, 231 aa, synthetic construct; identical to SEQ ID NO: 27198
  REGION 1..231: note = Description of Artificial Sequence: Synthetic polypeptide
  REGION 1..231: note = XENP022757 [ICOS]_H0_L0.29 one-arm mAb Fc-only Heavy Chain

SEQ ID NO: 28137 - protein, 214 aa, synthetic construct; identical to SEQ ID NO: 27996
  REGION 1..214: note = Description of Artificial Sequence: Synthetic polypeptide
  REGION 1..214: note = XENP022757 [ICOS]_H0_L0.29 one-arm mAb Light Chain

SEQ ID NO: 28138 - protein, 454 aa, synthetic construct; identical to SEQ ID NO: 26442
  REGION 1..454: note = Description of Artificial Sequence: Synthetic polypeptide
  REGION 1..454: note = XENP022758 [ICOS]_H0_L0.30 one-arm mAb Fab-Fc Heavy Chain

SEQ ID NO: 28139 - protein, 231 aa, synthetic construct; identical to SEQ ID NO: 27198
  REGION 1..231: note = Description of Artificial Sequence: Synthetic polypeptide
  REGION 1..231: note = XENP022758 [ICOS]_H0_L0.30 one-arm mAb Fc-only Heavy Chain

SEQ ID NO: 28140 - protein, 214 aa, synthetic construct; identical to SEQ ID NO: 27998
  REGION 1..214: note = Description of Artificial Sequence: Synthetic polypeptide
  REGION 1..214: note = XENP022758 [ICOS]_H0_L0.30 one-arm mAb Light Chain

SEQ ID NO: 28141 - protein, 454 aa, synthetic construct; identical to SEQ ID NO: 26442
  REGION 1..454: note = Description of Artificial Sequence: Synthetic polypeptide
  REGION 1..454: note = XENP022759 [ICOS]_H0_L0.31 one-arm mAb Fab-Fc Heavy Chain

SEQ ID NO: 28142 - protein, 231 aa, synthetic construct; identical to SEQ ID NO: 27198
  REGION 1..231: note = Description of Artificial Sequence: Synthetic polypeptide
  REGION 1..231: note = XENP022759 [ICOS]_H0_L0.31 one-arm mAb Fc-only Heavy Chain

SEQ ID NO: 28143 - protein, 214 aa, synthetic construct; identical to SEQ ID NO: 28000
  REGION 1..214: note = Description of Artificial Sequence: Synthetic polypeptide
  REGION 1..214: note = XENP022759 [ICOS]_H0_L0.31 one-arm mAb Light Chain

SEQ ID NO: 28144 - protein, 454 aa, synthetic construct; identical to SEQ ID NO: 26442
  REGION 1..454: note = Description of Artificial Sequence: Synthetic polypeptide
  REGION 1..454: note = XENP022760 [ICOS]_H0_L0.32 one-arm mAb Fab-Fc Heavy Chain

SEQ ID NO: 28145 - protein, 231 aa, synthetic construct; identical to SEQ ID NO: 27198
  REGION 1..231: note = Description of Artificial Sequence: Synthetic polypeptide
  REGION 1..231: note = XENP022760 [ICOS]_H0_L0.32 one-arm mAb Fc-only Heavy Chain

SEQ ID NO: 28146 - protein, 214 aa, synthetic construct; identical to SEQ ID NO: 28002
  REGION 1..214: note = Description of Artificial Sequence: Synthetic polypeptide
  REGION 1..214: note = XENP022760 [ICOS]_H0_L0.32 one-arm mAb Light Chain

SEQ ID NO: 28147 - protein, 454 aa, synthetic construct; identical to SEQ ID NO: 26442
  REGION 1..454: note = Description of Artificial Sequence: Synthetic polypeptide
  REGION 1..454: note = XENP022761 [ICOS]_H0_L0.33 one-arm mAb Fab-Fc Heavy Chain

SEQ ID NO: 28148 - protein, 231 aa, synthetic construct; identical to SEQ ID NO: 27198
  REGION 1..231: note = Description of Artificial Sequence: Synthetic polypeptide
  REGION 1..231: note = XENP022761 [ICOS]_H0_L0.33 one-arm mAb Fc-only Heavy Chain

SEQ ID NO: 28149 - protein, 214 aa, synthetic construct; identical to SEQ ID NO: 28004
  REGION 1..214: note = Description of Artificial Sequence: Synthetic polypeptide
  REGION 1..214: note = XENP022761 [ICOS]_H0_L0.33 one-arm mAb Light Chain

SEQ ID NO: 28150 - protein, 454 aa, synthetic construct; identical to SEQ ID NO: 26442
  REGION 1..454: note = Description of Artificial Sequence: Synthetic polypeptide
  REGION 1..454: note = XENP022762 [ICOS]_H0_L0.34 one-arm mAb Fab-Fc Heavy Chain

SEQ ID NO: 28151 - protein, 231 aa, synthetic construct; identical to SEQ ID NO: 27198
  REGION 1..231: note = Description of Artificial Sequence: Synthetic polypeptide
  REGION 1..231: note = XENP022762 [ICOS]_H0_L0.34 one-arm mAb Fc-only Heavy Chain

SEQ ID NO: 28152 - protein, 214 aa, synthetic construct; identical to SEQ ID NO: 26497
  REGION 1..214: note = Description of Artificial Sequence: Synthetic polypeptide
  REGION 1..214: note = XENP022762 [ICOS]_H0_L0.34 one-arm mAb Light Chain

SEQ ID NO: 28153 - protein, 454 aa, synthetic construct; identical to SEQ ID NO: 26442
  REGION 1..454: note = Description of Artificial Sequence: Synthetic polypeptide
  REGION 1..454: note = XENP022763 [ICOS]_H0_L0.35 one-arm mAb Fab-Fc Heavy Chain

SEQ ID NO: 28154 - protein, 231 aa, synthetic construct; identical to SEQ ID NO: 27198
  REGION 1..231: note = Description of Artificial Sequence: Synthetic polypeptide
  REGION 1..231: note = XENP022763 [ICOS]_H0_L0.35 one-arm mAb Fc-only Heavy Chain

SEQ ID NO: 28155 - protein, 214 aa, synthetic construct; identical to SEQ ID NO: 28008
  REGION 1..214: note = Description of Artificial Sequence: Synthetic polypeptide
  REGION 1..214: note = XENP022763 [ICOS]_H0_L0.35 one-arm mAb Light Chain

SEQ ID NO: 28156 - protein, 454 aa, synthetic construct; identical to SEQ ID NO: 26442
  REGION 1..454: note = Description of Artificial Sequence: Synthetic polypeptide
  REGION 1..454: note = XENP022764 [ICOS]_H0_L0.36 one-arm mAb Fab-Fc Heavy Chain

SEQ ID NO: 28157 - protein, 231 aa, synthetic construct; identical to SEQ ID NO: 27198
  REGION 1..231: note = Description of Artificial Sequence: Synthetic polypeptide
  REGION 1..231: note = XENP022764 [ICOS]_H0_L0.36 one-arm mAb Fc-only Heavy Chain

SEQ ID NO: 28158 - protein, 214 aa, synthetic construct; identical to SEQ ID NO: 26517
  REGION 1..214: note = Description of Artificial Sequence: Synthetic polypeptide
  REGION 1..214: note = XENP022764 [ICOS]_H0_L0.36 one-arm mAb Light Chain

SEQ ID NO: 28159 - protein, 454 aa, synthetic construct; identical to SEQ ID NO: 26442
  REGION 1..454: note = Description of Artificial Sequence: Synthetic polypeptide
  REGION 1..454: note = XENP022765 [ICOS]_H0_L0.37 one-arm mAb Fab-Fc Heavy Chain

SEQ ID NO: 28160 - protein, 231 aa, synthetic construct; identical to SEQ ID NO: 27198
  REGION 1..231: note = Description of Artificial Sequence: Synthetic polypeptide
  REGION 1..231: note = XENP022765 [ICOS]_H0_L0.37 one-arm mAb Fc-only Heavy Chain

SEQ ID NO: 28161 - protein, 214 aa, synthetic construct; identical to SEQ ID NO: 26537
  REGION 1..214: note = Description of Artificial Sequence: Synthetic polypeptide
  REGION 1..214: note = XENP022765 [ICOS]_H0_L0.37 one-arm mAb Light Chain

SEQ ID NO: 28162 - protein, 454 aa, synthetic construct; identical to SEQ ID NO: 26442
  REGION 1..454: note = Description of Artificial Sequence: Synthetic polypeptide
  REGION 1..454: note = XENP022766 [ICOS]_H0_L0.38 one-arm mAb Fab-Fc Heavy Chain

SEQ ID NO: 28163 - protein, 231 aa, synthetic construct; identical to SEQ ID NO: 27198
  REGION 1..231: note = Description of Artificial Sequence: Synthetic polypeptide
  REGION 1..231: note = XENP022766 [ICOS]_H0_L0.38 one-arm mAb Fc-only Heavy Chain

SEQ ID NO: 28164 - protein, 214 aa, synthetic construct; identical to SEQ ID NO: 26557
  REGION 1..214: note = Description of Artificial Sequence: Synthetic polypeptide
  REGION 1..214: note = XENP022766 [ICOS]_H0_L0.38 one-arm mAb Light Chain

SEQ ID NO: 28165 - protein, 454 aa, synthetic construct; identical to SEQ ID NO: 26442
  REGION 1..454: note = Description of Artificial Sequence: Synthetic polypeptide
  REGION 1..454: note = XENP022896 [ICOS]_H0_L0.42 one-arm mAb Fab-Fc Heavy Chain

SEQ ID NO: 28166 - protein, 231 aa, synthetic construct; identical to SEQ ID NO: 27198
  REGION 1..231: note = Description of Artificial Sequence: Synthetic polypeptide
  REGION 1..231: note = XENP022896 [ICOS]_H0_L0.42 one-arm mAb Fc-only Heavy Chain

SEQ ID NO: 28167 - protein, 214 aa, synthetic construct; identical to SEQ ID NO: 28016
  REGION 1..214: note = Description of Artificial Sequence: Synthetic polypeptide
  REGION 1..214: note = XENP022896 [ICOS]_H0_L0.42 one-arm mAb Light Chain

SEQ ID NO: 28168 - protein, 454 aa, synthetic construct; identical to SEQ ID NO: 26442
  REGION 1..454: note = Description of Artificial Sequence: Synthetic polypeptide
  REGION 1..454: note = XENP022901 [ICOS]_H0_L0.43 one-arm mAb Fab-Fc Heavy Chain

SEQ ID NO: 28169 - protein, 231 aa, synthetic construct; identical to SEQ ID NO: 27198
  REGION 1..231: note = Description of Artificial Sequence: Synthetic polypeptide
  REGION 1..231: note = XENP022901 [ICOS]_H0_L0.43 one-arm mAb Fc-only Heavy Chain

SEQ ID NO: 28170 - protein, 214 aa, synthetic construct; identical to SEQ ID NO: 28018
  REGION 1..214: note = Description of Artificial Sequence: Synthetic polypeptide
  REGION 1..214: note = XENP022901 [ICOS]_H0_L0.43 one-arm mAb Light Chain

SEQ ID NO: 28171 - protein, 454 aa, synthetic construct; identical to SEQ ID NO: 26442
  REGION 1..454: note = Description of Artificial Sequence: Synthetic polypeptide
  REGION 1..454: note = XENP022902 [ICOS]_H0_L0.44 one-arm mAb Fab-Fc Heavy Chain

SEQ ID NO: 28172 - protein, 231 aa, synthetic construct; identical to SEQ ID NO: 27198
  REGION 1..231: note = Description of Artificial Sequence: Synthetic polypeptide
  REGION 1..231: note = XENP022902 [ICOS]_H0_L0.44 one-arm mAb Fc-only Heavy Chain

SEQ ID NO: 28173 - protein, 214 aa, synthetic construct; identical to SEQ ID NO: 28020
  REGION 1..214: note = Description of Artificial Sequence: Synthetic polypeptide
  REGION 1..214: note = XENP022902 [ICOS]_H0_L0.44 one-arm mAb Light Chain

SEQ ID NO: 28174 - protein, 454 aa, synthetic construct
  REGION 1..454: note = Description of Artificial Sequence: Synthetic polypeptide
  REGION 1..454: note = XENP022903 [ICOS]_H0.35_L0.38 one-arm mAb Fab-Fc Heavy Chain
QVQLVQSGAEVKKPGASVKVSCKASGYTFTGYYMHWVRQAPGQGLEWMGWINPHSGGTNYAQKFQGRVTMTRDTSISTAYMELSRLRSDDTAVYYCARTYYYDTSGYYHDAFDVWGQGTMVTVSSASTKGPSVFPLAPSSKSTSGGTAALGCLVKDYFPEPVTVSWNSGALTSGVHTFPAVLQSSGLYSLSSVVTVPSSSLGTQTYICNVNHKPSDTKVDKKVEPKSCDKTHTCPPCPAPPVAGPSVFLFPPKPKDTLMISRTPEVTCVVVDVKHEDPEVKFNWYVDGVEVHNAKTKPREEEYNSTYRVVSVLTVLHQDWLNGKEYKCKVSNKALPAPIEKTISKAKGQPREPQVYTLPPSREEMTKNQVSLTCDVSGFYPSDIAVEWESDGQPENNYKTTPPVLDSDGSFFLYSKLTVDKSRWEQGDVFSCSVMHEALHNHYTQKSLSLSPGK

SEQ ID NO: 28175 - protein, 231 aa, synthetic construct; identical to SEQ ID NO: 27198
  REGION 1..231: note = Description of Artificial Sequence: Synthetic polypeptide
  REGION 1..231: note = XENP022903 [ICOS]_H0.35_L0.38 one-arm mAb Fc-only Heavy Chain

SEQ ID NO: 28176 - protein, 214 aa, synthetic construct; identical to SEQ ID NO: 26557
  REGION 1..214: note = Description of Artificial Sequence: Synthetic polypeptide
  REGION 1..214: note = XENP022903 [ICOS]_H0.35_L0.38 one-arm mAb Light Chain

SEQ ID NO: 28177 - protein, 454 aa, synthetic construct; identical to SEQ ID NO: 28174
  REGION 1..454: note = Description of Artificial Sequence: Synthetic polypeptide
  REGION 1..454: note = XENP022904 [ICOS]_H0.35_L0.42 one-arm mAb Fab-Fc Heavy Chain

SEQ ID NO: 28178 - protein, 231 aa, synthetic construct; identical to SEQ ID NO: 27198
  REGION 1..231: note = Description of Artificial Sequence: Synthetic polypeptide
  REGION 1..231: note = XENP022904 [ICOS]_H0.35_L0.42 one-arm mAb Fc-only Heavy Chain

SEQ ID NO: 28179 - protein, 214 aa, synthetic construct; identical to SEQ ID NO: 28016
  REGION 1..214: note = Description of Artificial Sequence: Synthetic polypeptide
  REGION 1..214: note = XENP022904 [ICOS]_H0.35_L0.42 one-arm mAb Light Chain

SEQ ID NO: 28180 - protein, 454 aa, synthetic construct; identical to SEQ ID NO: 28174
  REGION 1..454: note = Description of Artificial Sequence: Synthetic polypeptide
  REGION 1..454: note = XENP022905 [ICOS]_H0.35_L0.43 one-arm mAb Fab-Fc Heavy Chain

SEQ ID NO: 28181 - protein, 231 aa, synthetic construct; identical to SEQ ID NO: 27198
  REGION 1..231: note = Description of Artificial Sequence: Synthetic polypeptide
  REGION 1..231: note = XENP022905 [ICOS]_H0.35_L0.43 one-arm mAb Fc-only Heavy Chain

SEQ ID NO: 28182 - protein, 214 aa, synthetic construct; identical to SEQ ID NO: 28018
  REGION 1..214: note = Description of Artificial Sequence: Synthetic polypeptide
  REGION 1..214: note = XENP022905 [ICOS]_H0.35_L0.43 one-arm mAb Light Chain

SEQ ID NO: 28183 - protein, 454 aa, synthetic construct; identical to SEQ ID NO: 28174
  REGION 1..454: note = Description of Artificial Sequence: Synthetic polypeptide
  REGION 1..454: note = XENP022906 [ICOS]_H0.35_L0.44 one-arm mAb Fab-Fc Heavy Chain

SEQ ID NO: 28184 - protein, 231 aa, synthetic construct; identical to SEQ ID NO: 27198
  REGION 1..231: note = Description of Artificial Sequence: Synthetic polypeptide
  REGION 1..231: note = XENP022906 [ICOS]_H0.35_L0.44 one-arm mAb Fc-only Heavy Chain

SEQ ID NO: 28185 - protein, 214 aa, synthetic construct; identical to SEQ ID NO: 28020
  REGION 1..214: note = Description of Artificial Sequence: Synthetic polypeptide
  REGION 1..214: note = XENP022906 [ICOS]_H0.35_L0.44 one-arm mAb Light Chain

SEQ ID NO: 28186 - protein, 454 aa, synthetic construct
  REGION 1..454: note = Description of Artificial Sequence: Synthetic polypeptide
  REGION 1..454: note = XENP022907 [ICOS]_H0.61_L0.38 one-arm mAb Fab-Fc Heavy Chain
QVQLVQSGAEVKKPGASVKVSCKASGYTFTGYYMHWVRQAPGQGLEWMGIINPHSGGTNYAQKFQGRVTMTRDTSISTAYMELSRLRSDDTAVYYCARTYYYDTSGYYHDAFDVWGQGTMVTVSSASTKGPSVFPLAPSSKSTSGGTAALGCLVKDYFPEPVTVSWNSGALTSGVHTFPAVLQSSGLYSLSSVVTVPSSSLGTQTYICNVNHKPSDTKVDKKVEPKSCDKTHTCPPCPAPPVAGPSVFLFPPKPKDTLMISRTPEVTCVVVDVKHEDPEVKFNWYVDGVEVHNAKTKPREEEYNSTYRVVSVLTVLHQDWLNGKEYKCKVSNKALPAPIEKTISKAKGQPREPQVYTLPPSREEMTKNQVSLTCDVSGFYPSDIAVEWESDGQPENNYKTTPPVLDSDGSFFLYSKLTVDKSRWEQGDVFSCSVMHEALHNHYTQKSLSLSPGK

SEQ ID NO: 28187 - protein, 231 aa, synthetic construct; identical to SEQ ID NO: 27198
  REGION 1..231: note = Description of Artificial Sequence: Synthetic polypeptide
  REGION 1..231: note = XENP022907 [ICOS]_H0.61_L0.38 one-arm mAb Fc-only Heavy Chain

SEQ ID NO: 28188 - protein, 214 aa, synthetic construct; identical to SEQ ID NO: 26557
  REGION 1..214: note = Description of Artificial Sequence: Synthetic polypeptide
  REGION 1..214: note = XENP022907 [ICOS]_H0.61_L0.38 one-arm mAb Light Chain

SEQ ID NO: 28189 - protein, 454 aa, synthetic construct; identical to SEQ ID NO: 28186
  REGION 1..454: note = Description of Artificial Sequence: Synthetic polypeptide
  REGION 1..454: note = XENP022908 [ICOS]_H0.61_L0.42 one-arm mAb Fab-Fc Heavy Chain

SEQ ID NO: 28190 - protein, 231 aa, synthetic construct; identical to SEQ ID NO: 27198
  REGION 1..231: note = Description of Artificial Sequence: Synthetic polypeptide
  REGION 1..231: note = XENP022908 [ICOS]_H0.61_L0.42 one-arm mAb Fc-only Heavy Chain

SEQ ID NO: 28191 - protein, 214 aa, synthetic construct; identical to SEQ ID NO: 28016
  REGION 1..214: note = Description of Artificial Sequence: Synthetic polypeptide
  REGION 1..214: note = XENP022908 [ICOS]_H0.61_L0.42 one-arm mAb Light Chain

SEQ ID NO: 28192 - protein, 454 aa, synthetic construct; identical to SEQ ID NO: 28186
  REGION 1..454: note = Description of Artificial Sequence: Synthetic polypeptide
  REGION 1..454: note = XENP022909 [ICOS]_H0.61_L0.43 one-arm mAb Fab-Fc Heavy Chain

SEQ ID NO: 28193 - protein, 231 aa, synthetic construct; identical to SEQ ID NO: 27198
  REGION 1..231: note = Description of Artificial Sequence: Synthetic polypeptide
  REGION 1..231: note = XENP022909 [ICOS]_H0.61_L0.43 one-arm mAb Fc-only Heavy Chain

SEQ ID NO: 28194 - protein, 214 aa, synthetic construct; identical to SEQ ID NO: 28018
  REGION 1..214: note = Description of Artificial Sequence: Synthetic polypeptide
  REGION 1..214: note = XENP022909 [ICOS]_H0.61_L0.43 one-arm mAb Light Chain

SEQ ID NO: 28195 - protein, 454 aa, synthetic construct; identical to SEQ ID NO: 28186
  REGION 1..454: note = Description of Artificial Sequence: Synthetic polypeptide
  REGION 1..454: note = XENP022910 [ICOS]_H0.61_L0.44 one-arm mAb Fab-Fc Heavy Chain

SEQ ID NO: 28196 - protein, 231 aa, synthetic construct; identical to SEQ ID NO: 27198
  REGION 1..231: note = Description of Artificial Sequence: Synthetic polypeptide
  REGION 1..231: note = XENP022910 [ICOS]_H0.61_L0.44 one-arm mAb Fc-only Heavy Chain

SEQ ID NO: 28197 - protein, 214 aa, synthetic construct; identical to SEQ ID NO: 28020
  REGION 1..214: note = Description of Artificial Sequence: Synthetic polypeptide
  REGION 1..214: note = XENP022910 [ICOS]_H0.61_L0.44 one-arm mAb Light Chain

SEQ ID NO: 28198 - protein, 454 aa, synthetic construct
  REGION 1..454: note = Description of Artificial Sequence: Synthetic polypeptide
  REGION 1..454: note = XENP022911 [ICOS]_H0.24_L0.38 one-arm mAb Fab-Fc Heavy Chain
QVQLVQSGAEVKKPGASVKVSCKASGYTFTGYYMHWVRQAPGQGLEWMGWINPHSGGTNYAQKFQGRVTMTRDTSISTAYMELSRLRSDDTAVYYCARTYYYDTSGYYHDAFDIWGQGTMVTVSSASTKGPSVFPLAPSSKSTSGGTAALGCLVKDYFPEPVTVSWNSGALTSGVHTFPAVLQSSGLYSLSSVVTVPSSSLGTQTYICNVNHKPSDTKVDKKVEPKSCDKTHTCPPCPAPPVAGPSVFLFPPKPKDTLMISRTPEVTCVVVDVKHEDPEVKFNWYVDGVEVHNAKTKPREEEYNSTYRVVSVLTVLHQDWLNGKEYKCKVSNKALPAPIEKTISKAKGQPREPQVYTLPPSREEMTKNQVSLTCDVSGFYPSDIAVEWESDGQPENNYKTTPPVLDSDGSFFLYSKLTVDKSRWEQGDVFSCSVMHEALHNHYTQKSLSLSPGK

SEQ ID NO: 28199 - protein, 231 aa, synthetic construct; identical to SEQ ID NO: 27198
  REGION 1..231: note = Description of Artificial Sequence: Synthetic polypeptide
  REGION 1..231: note = XENP022911 [ICOS]_H0.24_L0.38 one-arm mAb Fc-only Heavy Chain

SEQ ID NO: 28200 - protein, 214 aa, synthetic construct; identical to SEQ ID NO: 26557
  REGION 1..214: note = Description of Artificial Sequence: Synthetic polypeptide
  REGION 1..214: note = XENP022911 [ICOS]_H0.24_L0.38 one-arm mAb Light Chain

SEQ ID NO: 28201 - protein, 454 aa, synthetic construct
  REGION 1..454: note = Description of Artificial Sequence: Synthetic polypeptide
  REGION 1..454: note = XENP022912 [ICOS]_H0.37_L0.38 one-arm mAb Fab-Fc Heavy Chain
QVQLVQSGAEVKKPGASVKVSCKASGYTFTGYYMHWVRQAPGQGLEWMGWINPHSGGTNYAQKFQGRVTMTRDTSISTAYMELSSLRSEDTAVYYCARTYYYDTSGYYHDAFDVWGQGTMVTVSSASTKGPSVFPLAPSSKSTSGGTAALGCLVKDYFPEPVTVSWNSGALTSGVHTFPAVLQSSGLYSLSSVVTVPSSSLGTQTYICNVNHKPSDTKVDKKVEPKSCDKTHTCPPCPAPPVAGPSVFLFPPKPKDTLMISRTPEVTCVVVDVKHEDPEVKFNWYVDGVEVHNAKTKPREEEYNSTYRVVSVLTVLHQDWLNGKEYKCKVSNKALPAPIEKTISKAKGQPREPQVYTLPPSREEMTKNQVSLTCDVSGFYPSDIAVEWESDGQPENNYKTTPPVLDSDGSFFLYSKLTVDKSRWEQGDVFSCSVMHEALHNHYTQKSLSLSPGK

SEQ ID NO: 28202 - protein, 231 aa, synthetic construct; identical to SEQ ID NO: 27198
  REGION 1..231: note = Description of Artificial Sequence: Synthetic polypeptide
  REGION 1..231: note = XENP022912 [ICOS]_H0.37_L0.38 one-arm mAb Fc-only Heavy Chain

SEQ ID NO: 28203 - protein, 214 aa, synthetic construct; identical to SEQ ID NO: 26557
  REGION 1..214: note = Description of Artificial Sequence: Synthetic polypeptide
  REGION 1..214: note = XENP022912 [ICOS]_H0.37_L0.38 one-arm mAb Light Chain

SEQ ID NO: 28204 - protein, 454 aa, synthetic construct
  REGION 1..454: note = Description of Artificial Sequence: Synthetic polypeptide
  REGION 1..454: note = XENP022913 [ICOS]_H0.40_L0.38 one-arm mAb Fab-Fc Heavy Chain
QVQLVQSGAEVKKPGASVKVSCKASGYTFTGYYMHWVRQAPGQGLEWMGWINPHSGETNYAQKFQGRVTMTRDTSISTAYMELSSLRSEDTAVYYCARTYYYDTSGYYHDAFDVWGQGTMVTVSSASTKGPSVFPLAPSSKSTSGGTAALGCLVKDYFPEPVTVSWNSGALTSGVHTFPAVLQSSGLYSLSSVVTVPSSSLGTQTYICNVNHKPSDTKVDKKVEPKSCDKTHTCPPCPAPPVAGPSVFLFPPKPKDTLMISRTPEVTCVVVDVKHEDPEVKFNWYVDGVEVHNAKTKPREEEYNSTYRVVSVLTVLHQDWLNGKEYKCKVSNKALPAPIEKTISKAKGQPREPQVYTLPPSREEMTKNQVSLTCDVSGFYPSDIAVEWESDGQPENNYKTTPPVLDSDGSFFLYSKLTVDKSRWEQGDVFSCSVMHEALHNHYTQKSLSLSPGK

SEQ ID NO: 28205 - protein, 231 aa, synthetic construct; identical to SEQ ID NO: 27198
  REGION 1..231: note = Description of Artificial Sequence: Synthetic polypeptide
  REGION 1..231: note = XENP022913 [ICOS]_H0.40_L0.38 one-arm mAb Fc-only Heavy Chain

SEQ ID NO: 28206 - protein, 214 aa, synthetic construct; identical to SEQ ID NO: 26557
  REGION 1..214: note = Description of Artificial Sequence: Synthetic polypeptide
  REGION 1..214: note = XENP022913 [ICOS]_H0.40_L0.38 one-arm mAb Light Chain

SEQ ID NO: 28207 - protein, 454 aa, synthetic construct
  REGION 1..454: note = Description of Artificial Sequence: Synthetic polypeptide
  REGION 1..454: note = XENP022914 [ICOS]_H0.44_L0.38 one-arm mAb Fab-Fc Heavy Chain
QVQLVQSGAEVKKPGASVKVSCKASGYTFTGYYMHWVRQAPGQGLEWMGWINPHSGGTNYAQKFQGRVTITADESTSTAYMELSRLRSDDTAVYYCARTYYYDTSGYYHDAFDVWGQGTMVTVSSASTKGPSVFPLAPSSKSTSGGTAALGCLVKDYFPEPVTVSWNSGALTSGVHTFPAVLQSSGLYSLSSVVTVPSSSLGTQTYICNVNHKPSDTKVDKKVEPKSCDKTHTCPPCPAPPVAGPSVFLFPPKPKDTLMISRTPEVTCVVVDVKHEDPEVKFNWYVDGVEVHNAKTKPREEEYNSTYRVVSVLTVLHQDWLNGKEYKCKVSNKALPAPIEKTISKAKGQPREPQVYTLPPSREEMTKNQVSLTCDVSGFYPSDIAVEWESDGQPENNYKTTPPVLDSDGSFFLYSKLTVDKSRWEQGDVFSCSVMHEALHNHYTQKSLSLSPGK

SEQ ID NO: 28208 - protein, 231 aa, synthetic construct; identical to SEQ ID NO: 27198
  REGION 1..231: note = Description of Artificial Sequence: Synthetic polypeptide
  REGION 1..231: note = XENP022914 [ICOS]_H0.44_L0.38 one-arm mAb Fc-only Heavy Chain

SEQ ID NO: 28209 - protein, 214 aa, synthetic construct; identical to SEQ ID NO: 26557
  REGION 1..214: note = Description of Artificial Sequence: Synthetic polypeptide
  REGION 1..214: note = XENP022914 [ICOS]_H0.44_L0.38 one-arm mAb Light Chain

SEQ ID NO: 28210 - protein, 454 aa, synthetic construct
  REGION 1..454: note = Description of Artificial Sequence: Synthetic polypeptide
  REGION 1..454: note = XENP022915 [ICOS]_H0.56_L0.38 one-arm mAb Fab-Fc Heavy Chain
QVQLVQSGAEVKKPGASVKVSCKASGYTFTGYYMHWVRQAPGQGLEWMGIINPHSGGTNYAQKFQGRVTMTRDTSISTAYMELSRLRSDDTAVYYCARTYYYDTSGYYHDAFDIWGQGTMVTVSSASTKGPSVFPLAPSSKSTSGGTAALGCLVKDYFPEPVTVSWNSGALTSGVHTFPAVLQSSGLYSLSSVVTVPSSSLGTQTYICNVNHKPSDTKVDKKVEPKSCDKTHTCPPCPAPPVAGPSVFLFPPKPKDTLMISRTPEVTCVVVDVKHEDPEVKFNWYVDGVEVHNAKTKPREEEYNSTYRVVSVLTVLHQDWLNGKEYKCKVSNKALPAPIEKTISKAKGQPREPQVYTLPPSREEMTKNQVSLTCDVSGFYPSDIAVEWESDGQPENNYKTTPPVLDSDGSFFLYSKLTVDKSRWEQGDVFSCSVMHEALHNHYTQKSLSLSPGK

SEQ ID NO: 28211 - protein, 231 aa, synthetic construct; identical to SEQ ID NO: 27198
  REGION 1..231: note = Description of Artificial Sequence: Synthetic polypeptide
  REGION 1..231: note = XENP022915 [ICOS]_H0.56_L0.38 one-arm mAb Fc-only Heavy Chain

SEQ ID NO: 28212 - protein, 214 aa, synthetic construct; identical to SEQ ID NO: 26557
  REGION 1..214: note = Description of Artificial Sequence: Synthetic polypeptide
  REGION 1..214: note = XENP022915 [ICOS]_H0.56_L0.38 one-arm mAb Light Chain

SEQ ID NO: 28213 - protein, 454 aa, synthetic construct
  REGION 1..454: note = Description of Artificial Sequence: Synthetic polypeptide
  REGION 1..454: note = XENP022916 [ICOS]_H0.62_L0.38 one-arm mAb Fab-Fc Heavy Chain
QVQLVQSGAEVKKPGASVKVSCKASGYTFTGYYMHWVRQAPGQGLEWMGWINPHSGGTNYAQKFQGRVTMTEDTSTDTAYMELSRLRSDDTAVYYCARTYYYDTSGYYHDAFDVWGQGTMVTVSSASTKGPSVFPLAPSSKSTSGGTAALGCLVKDYFPEPVTVSWNSGALTSGVHTFPAVLQSSGLYSLSSVVTVPSSSLGTQTYICNVNHKPSDTKVDKKVEPKSCDKTHTCPPCPAPPVAGPSVFLFPPKPKDTLMISRTPEVTCVVVDVKHEDPEVKFNWYVDGVEVHNAKTKPREEEYNSTYRVVSVLTVLHQDWLNGKEYKCKVSNKALPAPIEKTISKAKGQPREPQVYTLPPSREEMTKNQVSLTCDVSGFYPSDIAVEWESDGQPENNYKTTPPVLDSDGSFFLYSKLTVDKSRWEQGDVFSCSVMHEALHNHYTQKSLSLSPGK

SEQ ID NO: 28214 - protein, 231 aa, synthetic construct; identical to SEQ ID NO: 27198
  REGION 1..231: note = Description of Artificial Sequence: Synthetic polypeptide
  REGION 1..231: note = XENP022916 [ICOS]_H0.62_L0.38 one-arm mAb Fc-only Heavy Chain

SEQ ID NO: 28215 - protein, 214 aa, synthetic construct; identical to SEQ ID NO: 26557
  REGION 1..214: note = Description of Artificial Sequence: Synthetic polypeptide
  REGION 1..214: note = XENP022916 [ICOS]_H0.62_L0.38 one-arm mAb Light Chain

SEQ ID NO: 28216 - protein, 454 aa, synthetic construct; identical to SEQ ID NO: 28174
  REGION 1..454: note = Description of Artificial Sequence: Synthetic polypeptide
  REGION 1..454: note = XENP022933 [ICOS]_H0.35_L0.36 one-arm mAb Fab-Fc Heavy Chain

SEQ ID NO: 28217 - protein, 231 aa, synthetic construct; identical to SEQ ID NO: 27198
  REGION 1..231: note = Description of Artificial Sequence: Synthetic polypeptide
  REGION 1..231: note = XENP022933 [ICOS]_H0.35_L0.36 one-arm mAb Fc-only Heavy Chain

SEQ ID NO: 28218 - protein, 214 aa, synthetic construct; identical to SEQ ID NO: 26517
  REGION 1..214: note = Description of Artificial Sequence: Synthetic polypeptide
  REGION 1..214: note = XENP022933 [ICOS]_H0.35_L0.36 one-arm mAb Light Chain

SEQ ID NO: 28219 - protein, 454 aa, synthetic construct; identical to SEQ ID NO: 28186
  REGION 1..454: note = Description of Artificial Sequence: Synthetic polypeptide
  REGION 1..454: note = XENP022934 [ICOS]_H0.61_L0.36 one-arm mAb Fab-Fc Heavy Chain

SEQ ID NO: 28220 - protein, 231 aa, synthetic construct; identical to SEQ ID NO: 27198
  REGION 1..231: note = Description of Artificial Sequence: Synthetic polypeptide
  REGION 1..231: note = XENP022934 [ICOS]_H0.61_L0.36 one-arm mAb Fc-only Heavy Chain

SEQ ID NO: 28221 - protein, 214 aa, synthetic construct; identical to SEQ ID NO: 26517
  REGION 1..214: note = Description of Artificial Sequence: Synthetic polypeptide
  REGION 1..214: note = XENP022934 [ICOS]_H0.61_L0.36 one-arm mAb Light Chain

SEQ ID NO: 28222 - protein, 454 aa, synthetic construct; identical to SEQ ID NO: 28198
  REGION 1..454: note = Description of Artificial Sequence: Synthetic polypeptide
  REGION 1..454: note = XENP022962 [ICOS]_H0.24_L0.37 one-arm mAb Fab-Fc Heavy Chain

SEQ ID NO: 28223 - protein, 231 aa, synthetic construct; identical to SEQ ID NO: 27198
  REGION 1..231: note = Description of Artificial Sequence: Synthetic polypeptide
  REGION 1..231: note = XENP022962 [ICOS]_H0.24_L0.37 one-arm mAb Fc-only Heavy Chain

SEQ ID NO: 28224 - protein, 214 aa, synthetic construct; identical to SEQ ID NO: 26537
  REGION 1..214: note = Description of Artificial Sequence: Synthetic polypeptide
  REGION 1..214: note = XENP022962 [ICOS]_H0.24_L0.37 one-arm mAb Light Chain

SEQ ID NO: 28225 - protein, 454 aa, synthetic construct; identical to SEQ ID NO: 28201
  REGION 1..454: note = Description of Artificial Sequence: Synthetic polypeptide
  REGION 1..454: note = XENP022963 [ICOS]_H0.37_L0.37 one-arm mAb Fab-Fc Heavy Chain

SEQ ID NO: 28226 - protein, 231 aa, synthetic construct; identical to SEQ ID NO: 27198
  REGION 1..231: note = Description of Artificial Sequence: Synthetic polypeptide
  REGION 1..231: note = XENP022963 [ICOS]_H0.37_L0.37 one-arm mAb Fc-only Heavy Chain

SEQ ID NO: 28227 - protein, 214 aa, synthetic construct; identical to SEQ ID NO: 26537
  REGION 1..214: note = Description of Artificial Sequence: Synthetic polypeptide
  REGION 1..214: note = XENP022963 [ICOS]_H0.37_L0.37 one-arm mAb Light Chain

SEQ ID NO: 28228 - protein, 454 aa, synthetic construct; identical to SEQ ID NO: 28204
  REGION 1..454: note = Description of Artificial Sequence: Synthetic polypeptide
  REGION 1..454: note = XENP022964 [ICOS]_H0.40_L0.37 one-arm mAb Fab-Fc Heavy Chain

SEQ ID NO: 28229 - protein, 231 aa, synthetic construct; identical to SEQ ID NO: 27198
  REGION 1..231: note = Description of Artificial Sequence: Synthetic polypeptide
  REGION 1..231: note = XENP022964 [ICOS]_H0.40_L0.37 one-arm mAb Fc-only Heavy Chain

SEQ ID NO: 28230 - protein, 214 aa, synthetic construct; identical to SEQ ID NO: 26537
  REGION 1..214: note = Description of Artificial Sequence: Synthetic polypeptide
  REGION 1..214: note = XENP022964 [ICOS]_H0.40_L0.37 one-arm mAb Light Chain

SEQ ID NO: 28231 - protein, 454 aa, synthetic construct; identical to SEQ ID NO: 28207
  REGION 1..454: note = Description of Artificial Sequence: Synthetic polypeptide
  REGION 1..454: note = XENP022965 [ICOS]_H0.44_L0.37 one-arm mAb Fab-Fc Heavy Chain

SEQ ID NO: 28232 - protein, 231 aa, synthetic construct; identical to SEQ ID NO: 27198
  REGION 1..231: note = Description of Artificial Sequence: Synthetic polypeptide
  REGION 1..231: note = XENP022965 [ICOS]_H0.44_L0.37 one-arm mAb Fc-only Heavy Chain

SEQ ID NO: 28233 - protein, 214 aa, synthetic construct; identical to SEQ ID NO: 26537
  REGION 1..214: note = Description of Artificial Sequence: Synthetic polypeptide
  REGION 1..214: note = XENP022965 [ICOS]_H0.44_L0.37 one-arm mAb Light Chain

SEQ ID NO: 28234 - protein, 454 aa, synthetic construct; identical to SEQ ID NO: 28210
  REGION 1..454: note = Description of Artificial Sequence: Synthetic polypeptide
  REGION 1..454: note = XENP022966 [ICOS]_H0.56_L0.37 one-arm mAb Fab-Fc Heavy Chain

SEQ ID NO: 28235 - protein, 231 aa, synthetic construct; identical to SEQ ID NO: 27198
  REGION 1..231: note = Description of Artificial Sequence: Synthetic polypeptide
  REGION 1..231: note = XENP022966 [ICOS]_H0.56_L0.37 one-arm mAb Fc-only Heavy Chain

SEQ ID NO: 28236 - protein, 214 aa, synthetic construct; identical to SEQ ID NO: 26537
  REGION 1..214: note = Description of Artificial Sequence: Synthetic polypeptide
  REGION 1..214: note = XENP022966 [ICOS]_H0.56_L0.37 one-arm mAb Light Chain

SEQ ID NO: 28237 - protein, 454 aa, synthetic construct; identical to SEQ ID NO: 28213
  REGION 1..454: note = Description of Artificial Sequence: Synthetic polypeptide
  REGION 1..454: note = XENP022967 [ICOS]_H0.62_L0.37 one-arm mAb Fab-Fc Heavy Chain

SEQ ID NO: 28238 - protein, 231 aa, synthetic construct; identical to SEQ ID NO: 27198
  REGION 1..231: note = Description of Artificial Sequence: Synthetic polypeptide
  REGION 1..231: note = XENP022967 [ICOS]_H0.62_L0.37 one-arm mAb Fc-only Heavy Chain

SEQ ID NO: 28239 - protein, 214 aa, synthetic construct; identical to SEQ ID NO: 26537
  REGION 1..214: note = Description of Artificial Sequence: Synthetic polypeptide
  REGION 1..214: note = XENP022967 [ICOS]_H0.62_L0.37 one-arm mAb Light Chain

SEQ ID NO: 28240 - protein, 454 aa, synthetic construct; identical to SEQ ID NO: 28174
  REGION 1..454: note = Description of Artificial Sequence: Synthetic polypeptide
  REGION 1..454: note = XENP022968 [ICOS]_H0.35_L0.34 one-arm mAb Fab-Fc Heavy Chain

SEQ ID NO: 28241 - protein, 231 aa, synthetic construct; identical to SEQ ID NO: 27198
  REGION 1..231: note = Description of Artificial Sequence: Synthetic polypeptide
  REGION 1..231: note = XENP022968 [ICOS]_H0.35_L0.34 one-arm mAb Fc-only Heavy Chain

SEQ ID NO: 28242 - protein, 214 aa, synthetic construct; identical to SEQ ID NO: 26497
  REGION 1..214: note = Description of Artificial Sequence: Synthetic polypeptide
  REGION 1..214: note = XENP022968 [ICOS]_H0.35_L0.34 one-arm mAb Light Chain

SEQ ID NO: 28243 - protein, 454 aa, synthetic construct; identical to SEQ ID NO: 28174
  REGION 1..454: note = Description of Artificial Sequence: Synthetic polypeptide
  REGION 1..454: note = XENP022969 [ICOS]_H0.35_L0.35 one-arm mAb Fab-Fc Heavy Chain

SEQ ID NO: 28244 - protein, 231 aa, synthetic construct; identical to SEQ ID NO: 27198
  REGION 1..231: note = Description of Artificial Sequence: Synthetic polypeptide
  REGION 1..231: note = XENP022969 [ICOS]_H0.35_L0.35 one-arm mAb Fc-only Heavy Chain

SEQ ID NO: 28245 - protein, 214 aa, synthetic construct; identical to SEQ ID NO: 28008
  REGION 1..214: note = Description of Artificial Sequence: Synthetic polypeptide
  REGION 1..214: note = XENP022969 [ICOS]_H0.35_L0.35 one-arm mAb Light Chain

SEQ ID NO: 28246 - protein, 454 aa, synthetic construct; identical to SEQ ID NO: 28174
  REGION 1..454: note = Description of Artificial Sequence: Synthetic polypeptide
  REGION 1..454: note = XENP022970 [ICOS]_H0.35_L0.37 one-arm mAb Fab-Fc Heavy Chain

SEQ ID NO: 28247 - protein, 231 aa, synthetic construct; identical to SEQ ID NO: 27198
  REGION 1..231: note = Description of Artificial Sequence: Synthetic polypeptide
  REGION 1..231: note = XENP022970 [ICOS]_H0.35_L0.37 one-arm mAb Fc-only Heavy Chain

SEQ ID NO: 28248 - protein, 214 aa, synthetic construct; identical to SEQ ID NO: 26537
  REGION 1..214: note = Description of Artificial Sequence: Synthetic polypeptide
  REGION 1..214: note = XENP022970 [ICOS]_H0.35_L0.37 one-arm mAb Light Chain

SEQ ID NO: 28249 - protein, 454 aa, synthetic construct; identical to SEQ ID NO: 28186
  REGION 1..454: note = Description of Artificial Sequence: Synthetic polypeptide
  REGION 1..454: note = XENP022971 [ICOS]_H0.61_L0.34 one-arm mAb Fab-Fc Heavy Chain

SEQ ID NO: 28250 - protein, 231 aa, synthetic construct; identical to SEQ ID NO: 27198
  REGION 1..231: note = Description of Artificial Sequence: Synthetic polypeptide
  REGION 1..231: note = XENP022971 [ICOS]_H0.61_L0.34 one-arm mAb Fc-only Heavy Chain

SEQ ID NO: 28251 - protein, 214 aa, synthetic construct; identical to SEQ ID NO: 26497
  REGION 1..214: note = Description of Artificial Sequence: Synthetic polypeptide
  REGION 1..214: note = XENP022971 [ICOS]_H0.61_L0.34 one-arm mAb Light Chain

SEQ ID NO: 28252 - protein, 454 aa, synthetic construct; identical to SEQ ID NO: 28186
  REGION 1..454: note = Description of Artificial Sequence: Synthetic polypeptide
  REGION 1..454: note = XENP022972 [ICOS]_H0.61_L0.35 one-arm mAb Fab-Fc Heavy Chain

SEQ ID NO: 28253 - protein, 231 aa, synthetic construct; identical to SEQ ID NO: 27198
  REGION 1..231: note = Description of Artificial Sequence: Synthetic polypeptide
  REGION 1..231: note = XENP022972 [ICOS]_H0.61_L0.35 one-arm mAb Fc-only Heavy Chain

SEQ ID NO: 28254 - protein, 214 aa, synthetic construct; identical to SEQ ID NO: 28008
  REGION 1..214: note = Description of Artificial Sequence: Synthetic polypeptide
  REGION 1..214: note = XENP022972 [ICOS]_H0.61_L0.35 one-arm mAb Light Chain

SEQ ID NO: 28255 - protein, 454 aa, synthetic construct; identical to SEQ ID NO: 28186
  REGION 1..454: note = Description of Artificial Sequence: Synthetic polypeptide
  REGION 1..454: note = XENP022973 [ICOS]_H0.61_L0.37 one-arm mAb Fab-Fc Heavy Chain

SEQ ID NO: 28256 - protein, 231 aa, synthetic construct; identical to SEQ ID NO: 27198
  REGION 1..231: note = Description of Artificial Sequence: Synthetic polypeptide
  REGION 1..231: note = XENP022973 [ICOS]_H0.61_L0.37 one-arm mAb Fc-only Heavy Chain

SEQ ID NO: 28257 - protein, 214 aa, synthetic construct; identical to SEQ ID NO: 26537
  REGION 1..214: note = Description of Artificial Sequence: Synthetic polypeptide
  REGION 1..214: note = XENP022973 [ICOS]_H0.61_L0.37 one-arm mAb Light Chain

SEQ ID NO: 28258 - protein, 454 aa, synthetic construct; identical to SEQ ID NO: 28201
  REGION 1..454: note = Description of Artificial Sequence: Synthetic polypeptide
  REGION 1..454: note = XENP023094 [ICOS]_H0.37_L0 one-arm mAb Fab-Fc Heavy Chain

SEQ ID NO: 28259 - protein, 231 aa, synthetic construct; identical to SEQ ID NO: 27198
  REGION 1..231: note = Description of Artificial Sequence: Synthetic polypeptide
  REGION 1..231: note = XENP023094 [ICOS]_H0.37_L0 one-arm mAb Fc-only Heavy Chain

SEQ ID NO: 28260 - protein, 214 aa, synthetic construct; identical to SEQ ID NO: 26297
  REGION 1..214: note = Description of Artificial Sequence: Synthetic polypeptide
  REGION 1..214: note = XENP023094 [ICOS]_H0.37_L0 one-arm mAb Light Chain

SEQ ID NO: 28261 - protein, 454 aa, synthetic construct
  REGION 1..454: note = Description of Artificial Sequence: Synthetic polypeptide
  REGION 1..454: note = XENP023095 [ICOS]_H0.64_L0 one-arm mAb Fab-Fc Heavy Chain
QVQLVQSGAEVKKPGASVKVSCKASGYTFTGYYMHWVRQAPGQGLEWMGWINPHSGGTNYAQKFQGRVTMTEDTSTDTAYMELSSLRSEDTAVYYCARTYYYDTSGYYHDAFDVWGQGTMVTVSSASTKGPSVFPLAPSSKSTSGGTAALGCLVKDYFPEPVTVSWNSGALTSGVHTFPAVLQSSGLYSLSSVVTVPSSSLGTQTYICNVNHKPSDTKVDKKVEPKSCDKTHTCPPCPAPPVAGPSVFLFPPKPKDTLMISRTPEVTCVVVDVKHEDPEVKFNWYVDGVEVHNAKTKPREEEYNSTYRVVSVLTVLHQDWLNGKEYKCKVSNKALPAPIEKTISKAKGQPREPQVYTLPPSREEMTKNQVSLTCDVSGFYPSDIAVEWESDGQPENNYKTTPPVLDSDGSFFLYSKLTVDKSRWEQGDVFSCSVMHEALHNHYTQKSLSLSPGK

SEQ ID NO: 28262 - protein, 231 aa, synthetic construct; identical to SEQ ID NO: 27198
  REGION 1..231: note = Description of Artificial Sequence: Synthetic polypeptide
  REGION 1..231: note = XENP023095 [ICOS]_H0.64_L0 one-arm mAb Fc-only Heavy Chain

SEQ ID NO: 28263 - protein, 214 aa, synthetic construct; identical to SEQ ID NO: 26297
  REGION 1..214: note = Description of Artificial Sequence: Synthetic polypeptide
  REGION 1..214: note = XENP023095 [ICOS]_H0.64_L0 one-arm mAb Light Chain

SEQ ID NO: 28264 - protein, 454 aa, synthetic construct; identical to SEQ ID NO: 26562
  REGION 1..454: note = Description of Artificial Sequence: Synthetic polypeptide
  REGION 1..454: note = XENP023096 [ICOS]_H0.66_L0 one-arm mAb Fab-Fc Heavy Chain

SEQ ID NO: 28265 - protein, 231 aa, synthetic construct; identical to SEQ ID NO: 27198
  REGION 1..231: note = Description of Artificial Sequence: Synthetic polypeptide
  REGION 1..231: note = XENP023096 [ICOS]_H0.66_L0 one-arm mAb Fc-only Heavy Chain

SEQ ID NO: 28266 - protein, 214 aa, synthetic construct; identical to SEQ ID NO: 26297
  REGION 1..214: note = Description of Artificial Sequence: Synthetic polypeptide
  REGION 1..214: note = XENP023096 [ICOS]_H0.66_L0 one-arm mAb Light Chain

SEQ ID NO: 28267 - protein, 454 aa, synthetic construct
  REGION 1..454: note = Description of Artificial Sequence: Synthetic polypeptide
  REGION 1..454: note = XENP023101 [ICOS]_H0.67_L0 one-arm mAb Fab-Fc Heavy Chain
QVQLVQSGAEVKKPGASVKVSCKASGYTFTGYYMHWVRQAPGQGLEWMGWINPHSGETIYAQKFQGRVTMTEDTSTDTAYMELSSLRSEDTAVYYCARTYYYDTSGYYHDAFDVWGQGTMVTVSSASTKGPSVFPLAPSSKSTSGGTAALGCLVKDYFPEPVTVSWNSGALTSGVHTFPAVLQSSGLYSLSSVVTVPSSSLGTQTYICNVNHKPSDTKVDKKVEPKSCDKTHTCPPCPAPPVAGPSVFLFPPKPKDTLMISRTPEVTCVVVDVKHEDPEVKFNWYVDGVEVHNAKTKPREEEYNSTYRVVSVLTVLHQDWLNGKEYKCKVSNKALPAPIEKTISKAKGQPREPQVYTLPPSREEMTKNQVSLTCDVSGFYPSDIAVEWESDGQPENNYKTTPPVLDSDGSFFLYSKLTVDKSRWEQGDVFSCSVMHEALHNHYTQKSLSLSPGK

SEQ ID NO: 28268 - protein, 231 aa, synthetic construct; identical to SEQ ID NO: 27198
  REGION 1..231: note = Description of Artificial Sequence: Synthetic polypeptide
  REGION 1..231: note = XENP023101 [ICOS]_H0.67_L0 one-arm mAb Fc-only Heavy Chain

SEQ ID NO: 28269 - protein, 214 aa, synthetic construct; identical to SEQ ID NO: 26297
  REGION 1..214: note = Description of Artificial Sequence: Synthetic polypeptide
  REGION 1..214: note = XENP023101 [ICOS]_H0.67_L0 one-arm mAb Light Chain

SEQ ID NO: 28270 - protein, 454 aa, synthetic construct; identical to SEQ ID NO: 26442
  REGION 1..454: note = Description of Artificial Sequence: Synthetic polypeptide
  REGION 1..454: note = XENP020896 [ICOS]_H0L0 _Fab-1G6_L1.194_H1.279 Fab-Fc Heavy Chain

SEQ ID NO: 28271 - protein, 480 aa, synthetic construct; identical to SEQ ID NO: 2870
  REGION 1..480: note = Description of Artificial Sequence: Synthetic polypeptide
  REGION 1..480: note = XENP020896 [ICOS]_H0L0 _Fab-1G6_L1.194_H1.279 scFv-Fc Heavy Chain

SEQ ID NO: 28272 - protein, 214 aa, synthetic construct; identical to SEQ ID NO: 26297
  REGION 1..214: note = Description of Artificial Sequence: Synthetic polypeptide
  REGION 1..214: note = XENP020896 [ICOS]_H0L0_Fab-1G6_L1.194_H1.279 Light Chain

SEQ ID NO: 28273 - protein, 454 aa, synthetic construct; identical to SEQ ID NO: 26442
  REGION 1..454: note = Description of Artificial Sequence: Synthetic polypeptide
  REGION 1..454: note = XENP022432 [ICOS]_H0_L0.5_Fab-1G6_L1.194_H1.279 Fab-Fc Heavy Chain

SEQ ID NO: 28274 - protein, 480 aa, synthetic construct; identical to SEQ ID NO: 2870
  REGION 1..480: note = Description of Artificial Sequence: Synthetic polypeptide
  REGION 1..480: note = XENP022432 [ICOS]_H0_L0.5_Fab-1G6_L1.194_H1.279 scFv-Fc Heavy Chain

SEQ ID NO: 28275 - protein, 214 aa, synthetic construct; identical to SEQ ID NO: 27243
  REGION 1..214: note = Description of Artificial Sequence: Synthetic polypeptide
  REGION 1..214: note = XENP022432 [ICOS]_H0_L0.5_Fab-1G6_L1.194_H1.279 Light Chain

SEQ ID NO: 28276 - protein, 454 aa, synthetic construct; identical to SEQ ID NO: 26442
  REGION 1..454: note = Description of Artificial Sequence: Synthetic polypeptide
  REGION 1..454: note = XENP022433 [ICOS]_H0_L0.7_Fab-1G6_L1.194_H1.279 Fab-Fc Heavy Chain

SEQ ID NO: 28277 - protein, 480 aa, synthetic construct; identical to SEQ ID NO: 2870
  REGION 1..480: note = Description of Artificial Sequence: Synthetic polypeptide
  REGION 1..480: note = XENP022433 [ICOS]_H0_L0.7_Fab-1G6_L1.194_H1.279 scFv-Fc Heavy Chain

SEQ ID NO: 28278 - protein, 214 aa, synthetic construct; identical to SEQ ID NO: 26477
  REGION 1..214: note = Description of Artificial Sequence: Synthetic polypeptide
  REGION 1..214: note = XENP022433 [ICOS]_H0_L0.7_Fab-1G6_L1.194_H1.279 Light Chain

SEQ ID NO: 28279 - protein, 454 aa, synthetic construct; identical to SEQ ID NO: 26442
  REGION 1..454: note = Description of Artificial Sequence: Synthetic polypeptide
  REGION 1..454: note = XENP022434 [ICOS]_H0_L0.9_Fab-1G6_L1.194_H1.279 Fab-Fc Heavy Chain

SEQ ID NO: 28280 - protein, 480 aa, synthetic construct; identical to SEQ ID NO: 2870
  REGION 1..480: note = Description of Artificial Sequence: Synthetic polypeptide
  REGION 1..480: note = XENP022434 [ICOS]_H0_L0.9_Fab-1G6_L1.194_H1.279 scFv-Fc Heavy Chain

SEQ ID NO: 28281 - protein, 214 aa, synthetic construct; identical to SEQ ID NO: 27265
  REGION 1..214: note = Description of Artificial Sequence: Synthetic polypeptide
  REGION 1..214: note = XENP022434 [ICOS]_H0_L0.9_Fab-1G6_L1.194_H1.279 Light Chain

SEQ ID NO: 28282 - protein, 454 aa, synthetic construct; identical to SEQ ID NO: 26442
  REGION 1..454: note = Description of Artificial Sequence: Synthetic polypeptide
  REGION 1..454: note = XENP022435 [ICOS]_H0_L0.10_Fab-1G6_L1.194_H1.279 Fab-Fc Heavy Chain

SEQ ID NO: 28283 - protein, 480 aa, synthetic construct; identical to SEQ ID NO: 2870
  REGION 1..480: note = Description of Artificial Sequence: Synthetic polypeptide
  REGION 1..480: note = XENP022435 [ICOS]_H0_L0.10_Fab-1G6_L1.194_H1.279 scFv-Fc Heavy Chain

SEQ ID NO: 28284 - protein, 214 aa, synthetic construct; identical to SEQ ID NO: 27276
  REGION 1..214: note = Description of Artificial Sequence: Synthetic polypeptide
  REGION 1..214: note = XENP022435 [ICOS]_H0_L0.10_Fab-1G6_L1.194_H1.279 Light Chain

SEQ ID NO: 28285 - protein, 454 aa, synthetic construct; identical to SEQ ID NO: 26442
  REGION 1..454: note = Description of Artificial Sequence: Synthetic polypeptide
  REGION 1..454: note = XENP022436 [ICOS]_H0_L0.14_Fab-1G6_L1.194_H1.279 Fab-Fc Heavy Chain

SEQ ID NO: 28286 - protein, 480 aa, synthetic construct; identical to SEQ ID NO: 2870
  REGION 1..480: note = Description of Artificial Sequence: Synthetic polypeptide
  REGION 1..480: note = XENP022436 [ICOS]_H0_L0.14_Fab-1G6_L1.194_H1.279 scFv-Fc Heavy Chain

SEQ ID NO: 28287 - protein, 214 aa, synthetic construct; identical to SEQ ID NO: 27287
  REGION 1..214: note = Description of Artificial Sequence: Synthetic polypeptide
  REGION 1..214: note = XENP022436 [ICOS]_H0_L0.14_Fab-1G6_L1.194_H1.279 Light Chain

SEQ ID NO: 28288 - protein, 454 aa, synthetic construct; identical to SEQ ID NO: 26442
  REGION 1..454: note = Description of Artificial Sequence: Synthetic polypeptide
  REGION 1..454: note = XENP022437 [ICOS]_H0_L0.15_Fab-1G6_L1.194_H1.279 Fab-Fc Heavy Chain

SEQ ID NO: 28289 - protein, 480 aa, synthetic construct; identical to SEQ ID NO: 2870
  REGION 1..480: note = Description of Artificial Sequence: Synthetic polypeptide
  REGION 1..480: note = XENP022437 [ICOS]_H0_L0.15_Fab-1G6_L1.194_H1.279 scFv-Fc Heavy Chain

SEQ ID NO: 28290 - protein, 214 aa, synthetic construct; identical to SEQ ID NO: 27298
  REGION 1..214: note = Description of Artificial Sequence: Synthetic polypeptide
  REGION 1..214: note = XENP022437 [ICOS]_H0_L0.15_Fab-1G6_L1.194_H1.279 Light Chain

SEQ ID NO: 28291 - protein, 454 aa, synthetic construct; identical to SEQ ID NO: 26442
  REGION 1..454: note = Description of Artificial Sequence: Synthetic polypeptide
  REGION 1..454: note = XENP022438 [ICOS]_H0_L0.20_Fab-1G6_L1.194_H1.279 Fab-Fc Heavy Chain

SEQ ID NO: 28292 - protein, 480 aa, synthetic construct; identical to SEQ ID NO: 2870
  REGION 1..480: note = Description of Artificial Sequence: Synthetic polypeptide
  REGION 1..480: note = XENP022438 [ICOS]_H0_L0.20_Fab-1G6_L1.194_H1.279 scFv-Fc Heavy Chain

SEQ ID NO: 28293 - protein, 214 aa, synthetic construct; identical to SEQ ID NO: 27309
  REGION 1..214: note = Description of Artificial Sequence: Synthetic polypeptide
  REGION 1..214: note = XENP022438 [ICOS]_H0_L0.20_Fab-1G6_L1.194_H1.279 Light Chain

SEQ ID NO: 28294 - protein, 454 aa, synthetic construct; identical to SEQ ID NO: 26442
  REGION 1..454: note = Description of Artificial Sequence: Synthetic polypeptide
  REGION 1..454: note = XENP022731 [ICOS]_H0_L0.21_Fab-1G6_L1.194_H1.279 Fab-Fc Heavy Chain

SEQ ID NO: 28295 - protein, 480 aa, synthetic construct; identical to SEQ ID NO: 2870
  REGION 1..480: note = Description of Artificial Sequence: Synthetic polypeptide
  REGION 1..480: note = XENP022731 [ICOS]_H0_L0.21_Fab-1G6_L1.194_H1.279 scFv-Fc Heavy Chain

SEQ ID NO: 28296 - protein, 214 aa, synthetic construct; identical to SEQ ID NO: 27980
  REGION 1..214: note = Description of Artificial Sequence: Synthetic polypeptide
  REGION 1..214: note = XENP022731 [ICOS]_H0_L0.21_Fab-1G6_L1.194_H1.279 Light Chain

SEQ ID NO: 28297 - protein, 454 aa, synthetic construct; identical to SEQ ID NO: 26442
  REGION 1..454: note = Description of Artificial Sequence: Synthetic polypeptide
  REGION 1..454: note = XENP022732 [ICOS]_H0_L0.22_Fab-1G6_L1.194_H1.279 Fab-Fc Heavy Chain

SEQ ID NO: 28298 - protein, 480 aa, synthetic construct; identical to SEQ ID NO: 2870
  REGION 1..480: note = Description of Artificial Sequence: Synthetic polypeptide
  REGION 1..480: note = XENP022732 [ICOS]_H0_L0.22_Fab-1G6_L1.194_H1.279 scFv-Fc Heavy Chain

SEQ ID NO: 28299 - protein, 214 aa, synthetic construct; identical to SEQ ID NO: 27982
  REGION 1..214: note = Description of Artificial Sequence: Synthetic polypeptide
  REGION 1..214: note = XENP022732 [ICOS]_H0_L0.22_Fab-1G6_L1.194_H1.279 Light Chain

SEQ ID NO: 28300 - protein, 454 aa, synthetic construct; identical to SEQ ID NO: 26442
  REGION 1..454: note = Description of Artificial Sequence: Synthetic polypeptide
  REGION 1..454: note = XENP022733 [ICOS]_H0_L0.23_Fab-1G6_L1.194_H1.279 Fab-Fc Heavy Chain

SEQ ID NO: 28301 - protein, 480 aa, synthetic construct; identical to SEQ ID NO: 2870
  REGION 1..480: note = Description of Artificial Sequence: Synthetic polypeptide
  REGION 1..480: note = XENP022733 [ICOS]_H0_L0.23_Fab-1G6_L1.194_H1.279 scFv-Fc Heavy Chain

SEQ ID NO: 28302 - protein, 214 aa, synthetic construct; identical to SEQ ID NO: 27984
  REGION 1..214: note = Description of Artificial Sequence: Synthetic polypeptide
  REGION 1..214: note = XENP022733 [ICOS]_H0_L0.23_Fab-1G6_L1.194_H1.279 Light Chain

SEQ ID NO: 28303 - protein, 454 aa, synthetic construct; identical to SEQ ID NO: 26442
  REGION 1..454: note = Description of Artificial Sequence: Synthetic polypeptide
  REGION 1..454: note = XENP022734 [ICOS]_H0_L0.24_Fab-1G6_L1.194_H1.279 Fab-Fc Heavy Chain

SEQ ID NO: 28304 - protein, 480 aa, synthetic construct; identical to SEQ ID NO: 2870
  REGION 1..480: note = Description of Artificial Sequence: Synthetic polypeptide
  REGION 1..480: note = XENP022734 [ICOS]_H0_L0.24_Fab-1G6_L1.194_H1.279 scFv-Fc Heavy Chain

SEQ ID NO: 28305 - protein, 214 aa, synthetic construct; identical to SEQ ID NO: 27986
  REGION 1..214: note = Description of Artificial Sequence: Synthetic polypeptide
  REGION 1..214: note = XENP022734 [ICOS]_H0_L0.24_Fab-1G6_L1.194_H1.279 Light Chain

SEQ ID NO: 28306 - protein, 454 aa, synthetic construct; identical to SEQ ID NO: 26442
  REGION 1..454: note = Description of Artificial Sequence: Synthetic polypeptide
  REGION 1..454: note = XENP022735 [ICOS]_H0_L0.25_Fab-1G6_L1.194_H1.279 Fab-Fc Heavy Chain

SEQ ID NO: 28307 - protein, 480 aa, synthetic construct; identical to SEQ ID NO: 2870
  REGION 1..480: note = Description of Artificial Sequence: Synthetic polypeptide
  REGION 1..480: note = XENP022735 [ICOS]_H0_L0.25_Fab-1G6_L1.194_H1.279 scFv-Fc Heavy Chain

SEQ ID NO: 28308 - protein, 214 aa, synthetic construct; identical to SEQ ID NO: 27988
  REGION 1..214: note = Description of Artificial Sequence: Synthetic polypeptide
  REGION 1..214: note = XENP022735 [ICOS]_H0_L0.25_Fab-1G6_L1.194_H1.279 Light Chain

SEQ ID NO: 28309 - protein, 454 aa, synthetic construct; identical to SEQ ID NO: 26442
  REGION 1..454: note = Description of Artificial Sequence: Synthetic polypeptide
  REGION 1..454: note = XENP022736 [ICOS]_H0_L0.26_Fab-1G6_L1.194_H1.279 Fab-Fc Heavy Chain

SEQ ID NO: 28310 - protein, 480 aa, synthetic construct; identical to SEQ ID NO: 2870
  REGION 1..480: note = Description of Artificial Sequence: Synthetic polypeptide
  REGION 1..480: note = XENP022736 [ICOS]_H0_L0.26_Fab-1G6_L1.194_H1.279 scFv-Fc Heavy Chain

SEQ ID NO: 28311 - protein, 214 aa, synthetic construct; identical to SEQ ID NO: 27990
  REGION 1..214: note = Description of Artificial Sequence: Synthetic polypeptide
  REGION 1..214: note = XENP022736 [ICOS]_H0_L0.26_Fab-1G6_L1.194_H1.279 Light Chain

SEQ ID NO: 28312 - protein, 454 aa, synthetic construct; identical to SEQ ID NO: 26442
  REGION 1..454: note = Description of Artificial Sequence: Synthetic polypeptide
  REGION 1..454: note = XENP022737 [ICOS]_H0_L0.27_Fab-1G6_L1.194_H1.279 Fab-Fc Heavy Chain

SEQ ID NO: 28313 - protein, 480 aa, synthetic construct; identical to SEQ ID NO: 2870
  REGION 1..480: note = Description of Artificial Sequence: Synthetic polypeptide
  REGION 1..480: note = XENP022737 [ICOS]_H0_L0.27_Fab-1G6_L1.194_H1.279 scFv-Fc Heavy Chain

SEQ ID NO: 28314 - protein, 214 aa, synthetic construct; identical to SEQ ID NO: 27992
  REGION 1..214: note = Description of Artificial Sequence: Synthetic polypeptide
  REGION 1..214: note = XENP022737 [ICOS]_H0_L0.27_Fab-1G6_L1.194_H1.279 Light Chain

SEQ ID NO: 28315 - protein, 454 aa, synthetic construct; identical to SEQ ID NO: 26442
  REGION 1..454: note = Description of Artificial Sequence: Synthetic polypeptide
  REGION 1..454: note = XENP022738 [ICOS]_H0_L0.28_Fab-1G6_L1.194_H1.279 Fab-Fc Heavy Chain

SEQ ID NO: 28316 - protein, 480 aa, synthetic construct; identical to SEQ ID NO: 2870
  REGION 1..480: note = Description of Artificial Sequence: Synthetic polypeptide
  REGION 1..480: note = XENP022738 [ICOS]_H0_L0.28_Fab-1G6_L1.194_H1.279 scFv-Fc Heavy Chain

SEQ ID NO: 28317 - protein, 214 aa, synthetic construct; identical to SEQ ID NO: 27994
  REGION 1..214: note = Description of Artificial Sequence: Synthetic polypeptide
  REGION 1..214: note = XENP022738 [ICOS]_H0_L0.28_Fab-1G6_L1.194_H1.279 Light Chain

SEQ ID NO: 28318 - protein, 454 aa, synthetic construct; identical to SEQ ID NO: 26442
  REGION 1..454: note = Description of Artificial Sequence: Synthetic polypeptide
  REGION 1..454: note = XENP022739 [ICOS]_H0_L0.29_Fab-1G6_L1.194_H1.279 Fab-Fc Heavy Chain

SEQ ID NO: 28319 - protein, 480 aa, synthetic construct; identical to SEQ ID NO: 2870
  REGION 1..480: note = Description of Artificial Sequence: Synthetic polypeptide
  REGION 1..480: note = XENP022739 [ICOS]_H0_L0.29_Fab-1G6_L1.194_H1.279 scFv-Fc Heavy Chain

SEQ ID NO: 28320 - protein, 214 aa, synthetic construct; identical to SEQ ID NO: 27996
  REGION 1..214: note = Description of Artificial Sequence: Synthetic polypeptide
  REGION 1..214: note = XENP022739 [ICOS]_H0_L0.29_Fab-1G6_L1.194_H1.279 Light Chain

SEQ ID NO: 28321 - protein, 454 aa, synthetic construct; identical to SEQ ID NO: 26442
  REGION 1..454: note = Description of Artificial Sequence: Synthetic polypeptide
  REGION 1..454: note = XENP022740 [ICOS]_H0_L0.30_Fab-1G6_L1.194_H1.279 Fab-Fc Heavy Chain

SEQ ID NO: 28322 - protein, 480 aa, synthetic construct; identical to SEQ ID NO: 2870
  REGION 1..480: note = Description of Artificial Sequence: Synthetic polypeptide
  REGION 1..480: note = XENP022740 [ICOS]_H0_L0.30_Fab-1G6_L1.194_H1.279 scFv-Fc Heavy Chain

SEQ ID NO: 28323 - protein, 214 aa, synthetic construct; identical to SEQ ID NO: 27998
  REGION 1..214: note = Description of Artificial Sequence: Synthetic polypeptide
  REGION 1..214: note = XENP022740 [ICOS]_H0_L0.30_Fab-1G6_L1.194_H1.279 Light Chain

SEQ ID NO: 28324 - protein, 454 aa, synthetic construct; identical to SEQ ID NO: 26442
  REGION 1..454: note = Description of Artificial Sequence: Synthetic polypeptide
  REGION 1..454: note = XENP022741 [ICOS]_H0_L0.31_Fab-1G6_L1.194_H1.279 Fab-Fc Heavy Chain

SEQ ID NO: 28325 - protein, 480 aa, synthetic construct; identical to SEQ ID NO: 2870
  REGION 1..480: note = Description of Artificial Sequence: Synthetic polypeptide
  REGION 1..480: note = XENP022741 [ICOS]_H0_L0.31_Fab-1G6_L1.194_H1.279 scFv-Fc Heavy Chain

SEQ ID NO: 28326 - protein, 214 aa, synthetic construct; identical to SEQ ID NO: 28000
  REGION 1..214: note = Description of Artificial Sequence: Synthetic polypeptide
  REGION 1..214: note = XENP022741 [ICOS]_H0_L0.31_Fab-1G6_L1.194_H1.279 Light Chain

SEQ ID NO: 28327 - protein, 454 aa, synthetic construct; identical to SEQ ID NO: 26442
  REGION 1..454: note = Description of Artificial Sequence: Synthetic polypeptide
  REGION 1..454: note = XENP022742 [ICOS]_H0_L0.32_Fab-1G6_L1.194_H1.279 Fab-Fc Heavy Chain

SEQ ID NO: 28328 - protein, 480 aa, synthetic construct; identical to SEQ ID NO: 2870
  REGION 1..480: note = Description of Artificial Sequence: Synthetic polypeptide
  REGION 1..480: note = XENP022742 [ICOS]_H0_L0.32_Fab-1G6_L1.194_H1.279 scFv-Fc Heavy Chain

SEQ ID NO: 28329 - protein, 214 aa, synthetic construct; identical to SEQ ID NO: 28002
  REGION 1..214: note = Description of Artificial Sequence: Synthetic polypeptide
  REGION 1..214: note = XENP022742 [ICOS]_H0_L0.32_Fab-1G6_L1.194_H1.279 Light Chain

SEQ ID NO: 28330 - protein, 454 aa, synthetic construct; identical to SEQ ID NO: 26442
  REGION 1..454: note = Description of Artificial Sequence: Synthetic polypeptide
  REGION 1..454: note = XENP022743 [ICOS]_H0_L0.33_Fab-1G6_L1.194_H1.279 Fab-Fc Heavy Chain

SEQ ID NO: 28331 - protein, 480 aa, synthetic construct; identical to SEQ ID NO: 2870
  REGION 1..480: note = Description of Artificial Sequence: Synthetic polypeptide
  REGION 1..480: note = XENP022743 [ICOS]_H0_L0.33_Fab-1G6_L1.194_H1.279 scFv-Fc Heavy Chain

SEQ ID NO: 28332 - protein, 214 aa, synthetic construct; identical to SEQ ID NO: 28004
  REGION 1..214: note = Description of Artificial Sequence: Synthetic polypeptide
  REGION 1..214: note = XENP022743 [ICOS]_H0_L0.33_Fab-1G6_L1.194_H1.279 Light Chain

SEQ ID NO: 28333 - protein, 454 aa, synthetic construct; identical to SEQ ID NO: 26442
  REGION 1..454: note = Description of Artificial Sequence: Synthetic polypeptide
  REGION 1..454: note = XENP022744 [ICOS]_H0_L0.34_Fab-1G6_L1.194_H1.279 Fab-Fc Heavy Chain

SEQ ID NO: 28334 - protein, 480 aa, synthetic construct; identical to SEQ ID NO: 2870
  REGION 1..480: note = Description of Artificial Sequence: Synthetic polypeptide
  REGION 1..480: note = XENP022744 [ICOS]_H0_L0.34_Fab-1G6_L1.194_H1.279 scFv-Fc Heavy Chain

SEQ ID NO: 28335 - protein, 214 aa, synthetic construct; identical to SEQ ID NO: 26497
  REGION 1..214: note = Description of Artificial Sequence: Synthetic polypeptide
  REGION 1..214: note = XENP022744 [ICOS]_H0_L0.34_Fab-1G6_L1.194_H1.279 Light Chain

SEQ ID NO: 28336 - protein, 454 aa, synthetic construct; identical to SEQ ID NO: 26442
  REGION 1..454: note = Description of Artificial Sequence: Synthetic polypeptide
  REGION 1..454: note = XENP022745 [ICOS]_H0_L0.35_Fab-1G6_L1.194_H1.279 Fab-Fc Heavy Chain

SEQ ID NO: 28337 - protein, 480 aa, synthetic construct; identical to SEQ ID NO: 2870
  REGION 1..480: note = Description of Artificial Sequence: Synthetic polypeptide
  REGION 1..480: note = XENP022745 [ICOS]_H0_L0.35_Fab-1G6_L1.194_H1.279 scFv-Fc Heavy Chain

SEQ ID NO: 28338 - protein, 214 aa, synthetic construct; identical to SEQ ID NO: 28008
  REGION 1..214: note = Description of Artificial Sequence: Synthetic polypeptide
  REGION 1..214: note = XENP022745 [ICOS]_H0_L0.35_Fab-1G6_L1.194_H1.279 Light Chain

SEQ ID NO: 28339 - protein, 454 aa, synthetic construct; identical to SEQ ID NO: 26442
  REGION 1..454: note = Description of Artificial Sequence: Synthetic polypeptide
  REGION 1..454: note = XENP022746 [ICOS]_H0_L0.36_Fab-1G6_L1.194_H1.279 Fab-Fc Heavy Chain

SEQ ID NO: 28340 - protein, 480 aa, synthetic construct; identical to SEQ ID NO: 2870
  REGION 1..480: note = Description of Artificial Sequence: Synthetic polypeptide
  REGION 1..480: note = XENP022746 [ICOS]_H0_L0.36_Fab-1G6_L1.194_H1.279 scFv-Fc Heavy Chain

SEQ ID NO: 28341 - protein, 214 aa, synthetic construct; identical to SEQ ID NO: 26517
  REGION 1..214: note = Description of Artificial Sequence: Synthetic polypeptide
  REGION 1..214: note = XENP022746 [ICOS]_H0_L0.36_Fab-1G6_L1.194_H1.279 Light Chain

SEQ ID NO: 28342 - protein, 454 aa, synthetic construct; identical to SEQ ID NO: 26442
  REGION 1..454: note = Description of Artificial Sequence: Synthetic polypeptide
  REGION 1..454: note = XENP022747 [ICOS]_H0_L0.37_Fab-1G6_L1.194_H1.279 Fab-Fc Heavy Chain

SEQ ID NO: 28343 - protein, 480 aa, synthetic construct; identical to SEQ ID NO: 2870
  REGION 1..480: note = Description of Artificial Sequence: Synthetic polypeptide
  REGION 1..480: note = XENP022747 [ICOS]_H0_L0.37_Fab-1G6_L1.194_H1.279 scFv-Fc Heavy Chain

SEQ ID NO: 28344 - protein, 214 aa, synthetic construct; identical to SEQ ID NO: 26537
  REGION 1..214: note = Description of Artificial Sequence: Synthetic polypeptide
  REGION 1..214: note = XENP022747 [ICOS]_H0_L0.37_Fab-1G6_L1.194_H1.279 Light Chain

SEQ ID NO: 28345 - protein, 454 aa, synthetic construct; identical to SEQ ID NO: 26442
  REGION 1..454: note = Description of Artificial Sequence: Synthetic polypeptide
  REGION 1..454: note = XENP022748 [ICOS]_H0_L0.38_Fab-1G6_L1.194_H1.279 Fab-Fc Heavy Chain

SEQ ID NO: 28346 - protein, 480 aa, synthetic construct; identical to SEQ ID NO: 2870
  REGION 1..480: note = Description of Artificial Sequence: Synthetic polypeptide
  REGION 1..480: note = XENP022748 [ICOS]_H0_L0.38_Fab-1G6_L1.194_H1.279 scFv-Fc Heavy Chain

SEQ ID NO: 28347 - protein, 214 aa, synthetic construct; identical to SEQ ID NO: 26557
  REGION 1..214: note = Description of Artificial Sequence: Synthetic polypeptide
  REGION 1..214: note = XENP022748 [ICOS]_H0_L0.38_Fab-1G6_L1.194_H1.279 Light Chain

SEQ ID NO: 28348 - protein, 454 aa, synthetic construct; identical to SEQ ID NO: 26442
  REGION 1..454: note = Description of Artificial Sequence: Synthetic polypeptide
  REGION 1..454: note = XENP022878 [ICOS]_H0_L0.42_Fab-1G6_L1.194_H1.279 Fab-Fc Heavy Chain

SEQ ID NO: 28349 - protein, 480 aa, synthetic construct; identical to SEQ ID NO: 2870
  REGION 1..480: note = Description of Artificial Sequence: Synthetic polypeptide
  REGION 1..480: note = XENP022878 [ICOS]_H0_L0.42_Fab-1G6_L1.194_H1.279 scFv-Fc Heavy Chain

SEQ ID NO: 28350 - protein, 214 aa, synthetic construct; identical to SEQ ID NO: 28016
  REGION 1..214: note = Description of Artificial Sequence: Synthetic polypeptide
  REGION 1..214: note = XENP022878 [ICOS]_H0_L0.42_Fab-1G6_L1.194_H1.279 Light Chain

SEQ ID NO: 28351 - protein, 454 aa, synthetic construct; identical to SEQ ID NO: 26442
  REGION 1..454: note = Description of Artificial Sequence: Synthetic polypeptide
  REGION 1..454: note = XENP022879 [ICOS]_H0_L0.43_Fab-1G6_L1.194_H1.279 Fab-Fc Heavy Chain

SEQ ID NO: 28352 - protein, 480 aa, synthetic construct; identical to SEQ ID NO: 2870
  REGION 1..480: note = Description of Artificial Sequence: Synthetic polypeptide
  REGION 1..480: note = XENP022879 [ICOS]_H0_L0.43_Fab-1G6_L1.194_H1.279 scFv-Fc Heavy Chain

SEQ ID NO: 28353 - protein, 214 aa, synthetic construct; identical to SEQ ID NO: 28018
  REGION 1..214: note = Description of Artificial Sequence: Synthetic polypeptide
  REGION 1..214: note = XENP022879 [ICOS]_H0_L0.43_Fab-1G6_L1.194_H1.279 Light Chain

SEQ ID NO: 28354 - protein, 454 aa, synthetic construct; identical to SEQ ID NO: 26442
  REGION 1..454: note = Description of Artificial Sequence: Synthetic polypeptide
  REGION 1..454: note = XENP022880 [ICOS]_H0_L0.44_Fab-1G6_L1.194_H1.279 Fab-Fc Heavy Chain

SEQ ID NO: 28355 - protein, 480 aa, synthetic construct; identical to SEQ ID NO: 2870
  REGION 1..480: note = Description of Artificial Sequence: Synthetic polypeptide
  REGION 1..480: note = XENP022880 [ICOS]_H0_L0.44_Fab-1G6_L1.194_H1.279 scFv-Fc Heavy Chain

SEQ ID NO: 28356 - protein, 214 aa, synthetic construct; identical to SEQ ID NO: 28020
  REGION 1..214: note = Description of Artificial Sequence: Synthetic polypeptide
  REGION 1..214: note = XENP022880 [ICOS]_H0_L0.44_Fab-1G6_L1.194_H1.279 Light Chain

SEQ ID NO: 28357 - protein, 454 aa, synthetic construct; identical to SEQ ID NO: 28174
  REGION 1..454: note = Description of Artificial Sequence: Synthetic polypeptide
  REGION 1..454: note = XENP022881 [ICOS]_H0.35_L0.38_Fab-1G6_L1.194_H1.279 Fab-Fc Heavy Chain

SEQ ID NO: 28358 - protein, 480 aa, synthetic construct; identical to SEQ ID NO: 2870
  REGION 1..480: note = Description of Artificial Sequence: Synthetic polypeptide
  REGION 1..480: note = XENP022881 [ICOS]_H0.35_L0.38_Fab-1G6_L1.194_H1.279 scFv-Fc Heavy Chain

SEQ ID NO: 28359 - protein, 214 aa, synthetic construct; identical to SEQ ID NO: 26557
  REGION 1..214: note = Description of Artificial Sequence: Synthetic polypeptide
  REGION 1..214: note = XENP022881 [ICOS]_H0.35_L0.38_Fab-1G6_L1.194_H1.279 Light Chain

SEQ ID NO: 28360 - protein, 454 aa, synthetic construct; identical to SEQ ID NO: 28174
  REGION 1..454: note = Description of Artificial Sequence: Synthetic polypeptide
  REGION 1..454: note = XENP022882 [ICOS]_H0.35_L0.42_Fab-1G6_L1.194_H1.279 Fab-Fc Heavy Chain

SEQ ID NO: 28361 - protein, 480 aa, synthetic construct; identical to SEQ ID NO: 2870
  REGION 1..480: note = Description of Artificial Sequence: Synthetic polypeptide
  REGION 1..480: note = XENP022882 [ICOS]_H0.35_L0.42_Fab-1G6_L1.194_H1.279 scFv-Fc Heavy Chain

SEQ ID NO: 28362 - protein, 214 aa, synthetic construct; identical to SEQ ID NO: 28016
  REGION 1..214: note = Description of Artificial Sequence: Synthetic polypeptide
  REGION 1..214: note = XENP022882 [ICOS]_H0.35_L0.42_Fab-1G6_L1.194_H1.279 Light Chain

SEQ ID NO: 28363 - protein, 454 aa, synthetic construct; identical to SEQ ID NO: 28174
  REGION 1..454: note = Description of Artificial Sequence: Synthetic polypeptide
  REGION 1..454: note = XENP022883 [ICOS]_H0.35_L0.43_Fab-1G6_L1.194_H1.279 Fab-Fc Heavy Chain

SEQ ID NO: 28364 - protein, 480 aa, synthetic construct; identical to SEQ ID NO: 2870
  REGION 1..480: note = Description of Artificial Sequence: Synthetic polypeptide
  REGION 1..480: note = XENP022883 [ICOS]_H0.35_L0.43_Fab-1G6_L1.194_H1.279 scFv-Fc Heavy Chain

SEQ ID NO: 28365 - protein, 214 aa, synthetic construct; identical to SEQ ID NO: 28018
  REGION 1..214: note = Description of Artificial Sequence: Synthetic polypeptide
  REGION 1..214: note = XENP022883 [ICOS]_H0.35_L0.43_Fab-1G6_L1.194_H1.279 Light Chain

SEQ ID NO: 28366 - protein, 454 aa, synthetic construct; identical to SEQ ID NO: 28174
  REGION 1..454: note = Description of Artificial Sequence: Synthetic polypeptide
  REGION 1..454: note = XENP022884 [ICOS]_H0.35_L0.44_Fab-1G6_L1.194_H1.279 Fab-Fc Heavy Chain

SEQ ID NO: 28367 - protein, 480 aa, synthetic construct; identical to SEQ ID NO: 2870
  REGION 1..480: note = Description of Artificial Sequence: Synthetic polypeptide
  REGION 1..480: note = XENP022884 [ICOS]_H0.35_L0.44_Fab-1G6_L1.194_H1.279 scFv-Fc Heavy Chain

SEQ ID NO: 28368 - protein, 214 aa, synthetic construct; identical to SEQ ID NO: 28020
  REGION 1..214: note = Description of Artificial Sequence: Synthetic polypeptide
  REGION 1..214: note = XENP022884 [ICOS]_H0.35_L0.44_Fab-1G6_L1.194_H1.279 Light Chain

SEQ ID NO: 28369 - protein, 454 aa, synthetic construct; identical to SEQ ID NO: 28186
  REGION 1..454: note = Description of Artificial Sequence: Synthetic polypeptide
  REGION 1..454: note = XENP022885 [ICOS]_H0.61_L0.38_Fab-1G6_L1.194_H1.279 Fab-Fc Heavy Chain

SEQ ID NO: 28370 - protein, 480 aa, synthetic construct; identical to SEQ ID NO: 2870
  REGION 1..480: note = Description of Artificial Sequence: Synthetic polypeptide
  REGION 1..480: note = XENP022885 [ICOS]_H0.61_L0.38_Fab-1G6_L1.194_H1.279 scFv-Fc Heavy Chain

SEQ ID NO: 28371 - protein, 214 aa, synthetic construct; identical to SEQ ID NO: 26557
  REGION 1..214: note = Description of Artificial Sequence: Synthetic polypeptide
  REGION 1..214: note = XENP022885 [ICOS]_H0.61_L0.38_Fab-1G6_L1.194_H1.279 Light Chain

SEQ ID NO: 28372 - protein, 454 aa, synthetic construct; identical to SEQ ID NO: 28186
  REGION 1..454: note = Description of Artificial Sequence: Synthetic polypeptide
  REGION 1..454: note = XENP022886 [ICOS]_H0.61_L0.42_Fab-1G6_L1.194_H1.279 Fab-Fc Heavy Chain

SEQ ID NO: 28373 - protein, 480 aa, synthetic construct; identical to SEQ ID NO: 2870
  REGION 1..480: note = Description of Artificial Sequence: Synthetic polypeptide
  REGION 1..480: note = XENP022886 [ICOS]_H0.61_L0.42_Fab-1G6_L1.194_H1.279 scFv-Fc Heavy Chain

SEQ ID NO: 28374 - protein, 214 aa, synthetic construct; identical to SEQ ID NO: 28016
  REGION 1..214: note = Description of Artificial Sequence: Synthetic polypeptide
  REGION 1..214: note = XENP022886 [ICOS]_H0.61_L0.42_Fab-1G6_L1.194_H1.279 Light Chain

SEQ ID NO: 28375 - protein, 454 aa, synthetic construct; identical to SEQ ID NO: 28186
  REGION 1..454: note = Description of Artificial Sequence: Synthetic polypeptide
  REGION 1..454: note = XENP022887 [ICOS]_H0.61_L0.43_Fab-1G6_L1.194_H1.279 Fab-Fc Heavy Chain

SEQ ID NO: 28376 - protein, 480 aa, synthetic construct; identical to SEQ ID NO: 2870
  REGION 1..480: note = Description of Artificial Sequence: Synthetic polypeptide
  REGION 1..480: note = XENP022887 [ICOS]_H0.61_L0.43_Fab-1G6_L1.194_H1.279 scFv-Fc Heavy Chain

SEQ ID NO: 28377 - protein, 214 aa, synthetic construct; identical to SEQ ID NO: 28018
  REGION 1..214: note = Description of Artificial Sequence: Synthetic polypeptide
  REGION 1..214: note = XENP022887 [ICOS]_H0.61_L0.43_Fab-1G6_L1.194_H1.279 Light Chain

SEQ ID NO: 28378 - protein, 454 aa, synthetic construct; identical to SEQ ID NO: 28186
  REGION 1..454: note = Description of Artificial Sequence: Synthetic polypeptide
  REGION 1..454: note = XENP022888 [ICOS]_H0.61_L0.44_Fab-1G6_L1.194_H1.279 Fab-Fc Heavy Chain

SEQ ID NO: 28379 - protein, 480 aa, synthetic construct; identical to SEQ ID NO: 2870
  REGION 1..480: note = Description of Artificial Sequence: Synthetic polypeptide
  REGION 1..480: note = XENP022888 [ICOS]_H0.61_L0.44_Fab-1G6_L1.194_H1.279 scFv-Fc Heavy Chain

SEQ ID NO: 28380 - protein, 214 aa, synthetic construct; identical to SEQ ID NO: 28020
  REGION 1..214: note = Description of Artificial Sequence: Synthetic polypeptide
  REGION 1..214: note = XENP022888 [ICOS]_H0.61_L0.44_Fab-1G6_L1.194_H1.279 Light Chain

SEQ ID NO: 28381 - protein, 454 aa, synthetic construct; identical to SEQ ID NO: 28198
  REGION 1..454: note = Description of Artificial Sequence: Synthetic polypeptide
  REGION 1..454: note = XENP022889 [ICOS]_H0.24_L0.38_Fab-1G6_L1.194_H1.279 Fab-Fc Heavy Chain

SEQ ID NO: 28382 - protein, 480 aa, synthetic construct; identical to SEQ ID NO: 2870
  REGION 1..480: note = Description of Artificial Sequence: Synthetic polypeptide
  REGION 1..480: note = XENP022889 [ICOS]_H0.24_L0.38_Fab-1G6_L1.194_H1.279 scFv-Fc Heavy Chain

SEQ ID NO: 28383 - protein, 214 aa, synthetic construct; identical to SEQ ID NO: 26557
  REGION 1..214: note = Description of Artificial Sequence: Synthetic polypeptide
  REGION 1..214: note = XENP022889 [ICOS]_H0.24_L0.38_Fab-1G6_L1.194_H1.279 Light Chain

SEQ ID NO: 28384 - protein, 454 aa, synthetic construct; identical to SEQ ID NO: 28201
  REGION 1..454: note = Description of Artificial Sequence: Synthetic polypeptide
  REGION 1..454: note = XENP022890 [ICOS]_H0.37_L0.38_Fab-1G6_L1.194_H1.279 Fab-Fc Heavy Chain

SEQ ID NO: 28385 - protein, 480 aa, synthetic construct; identical to SEQ ID NO: 2870
  REGION 1..480: note = Description of Artificial Sequence: Synthetic polypeptide
  REGION 1..480: note = XENP022890 [ICOS]_H0.37_L0.38_Fab-1G6_L1.194_H1.279 scFv-Fc Heavy Chain

SEQ ID NO: 28386 - protein, 214 aa, synthetic construct; identical to SEQ ID NO: 26557
  REGION 1..214: note = Description of Artificial Sequence: Synthetic polypeptide
  REGION 1..214: note = XENP022890 [ICOS]_H0.37_L0.38_Fab-1G6_L1.194_H1.279 Light Chain

SEQ ID NO: 28387 - protein, 454 aa, synthetic construct; identical to SEQ ID NO: 28204
  REGION 1..454: note = Description of Artificial Sequence: Synthetic polypeptide
  REGION 1..454: note = XENP022891 [ICOS]_H0.40_L0.38_Fab-1G6_L1.194_H1.279 Fab-Fc Heavy Chain

SEQ ID NO: 28388 - protein, 480 aa, synthetic construct; identical to SEQ ID NO: 2870
  REGION 1..480: note = Description of Artificial Sequence: Synthetic polypeptide
  REGION 1..480: note = XENP022891 [ICOS]_H0.40_L0.38_Fab-1G6_L1.194_H1.279 scFv-Fc Heavy Chain

SEQ ID NO: 28389 - protein, 214 aa, synthetic construct; identical to SEQ ID NO: 26557
  REGION 1..214: note = Description of Artificial Sequence: Synthetic polypeptide
  REGION 1..214: note = XENP022891 [ICOS]_H0.40_L0.38_Fab-1G6_L1.194_H1.279 Light Chain

SEQ ID NO: 28390 - protein, 454 aa, synthetic construct; identical to SEQ ID NO: 28207
  REGION 1..454: note = Description of Artificial Sequence: Synthetic polypeptide
  REGION 1..454: note = XENP022892 [ICOS]_H0.44_L0.38_Fab-1G6_L1.194_H1.279 Fab-Fc Heavy Chain

SEQ ID NO: 28391 - protein, 480 aa, synthetic construct; identical to SEQ ID NO: 2870
  REGION 1..480: note = Description of Artificial Sequence: Synthetic polypeptide
  REGION 1..480: note = XENP022892 [ICOS]_H0.44_L0.38_Fab-1G6_L1.194_H1.279 scFv-Fc Heavy Chain

SEQ ID NO: 28392 - protein, 214 aa, synthetic construct; identical to SEQ ID NO: 26557
  REGION 1..214: note = Description of Artificial Sequence: Synthetic polypeptide
  REGION 1..214: note = XENP022892 [ICOS]_H0.44_L0.38_Fab-1G6_L1.194_H1.279 Light Chain

SEQ ID NO: 28393 - protein, 454 aa, synthetic construct; identical to SEQ ID NO: 28210
  REGION 1..454: note = Description of Artificial Sequence: Synthetic polypeptide
  REGION 1..454: note = XENP022893 [ICOS]_H0.56_L0.38_Fab-1G6_L1.194_H1.279 Fab-Fc Heavy Chain

SEQ ID NO: 28394 - protein, 480 aa, synthetic construct; identical to SEQ ID NO: 2870
  REGION 1..480: note = Description of Artificial Sequence: Synthetic polypeptide
  REGION 1..480: note = XENP022893 [ICOS]_H0.56_L0.38_Fab-1G6_L1.194_H1.279 scFv-Fc Heavy Chain

SEQ ID NO: 28395 - protein, 214 aa, synthetic construct; identical to SEQ ID NO: 26557
  REGION 1..214: note = Description of Artificial Sequence: Synthetic polypeptide
  REGION 1..214: note = XENP022893 [ICOS]_H0.56_L0.38_Fab-1G6_L1.194_H1.279 Light Chain

SEQ ID NO: 28396 - protein, 454 aa, synthetic construct; identical to SEQ ID NO: 28213
  REGION 1..454: note = Description of Artificial Sequence: Synthetic polypeptide
  REGION 1..454: note = XENP022894 [ICOS]_H0.62_L0.38_Fab-1G6_L1.194_H1.279 Fab-Fc Heavy Chain

SEQ ID NO: 28397 - protein, 480 aa, synthetic construct; identical to SEQ ID NO: 2870
  REGION 1..480: note = Description of Artificial Sequence: Synthetic polypeptide
  REGION 1..480: note = XENP022894 [ICOS]_H0.62_L0.38_Fab-1G6_L1.194_H1.279 scFv-Fc Heavy Chain

SEQ ID NO: 28398 - protein, 214 aa, synthetic construct; identical to SEQ ID NO: 26557
  REGION 1..214: note = Description of Artificial Sequence: Synthetic polypeptide
  REGION 1..214: note = XENP022894 [ICOS]_H0.62_L0.38_Fab-1G6_L1.194_H1.279 Light Chain

SEQ ID NO: 28399 - protein, 454 aa, synthetic construct; identical to SEQ ID NO: 28174
  REGION 1..454: note = Description of Artificial Sequence: Synthetic polypeptide
  REGION 1..454: note = XENP022931 [ICOS]_H0.35_L0.36_Fab-1G6_L1.194_H1.279 Fab-Fc Heavy Chain

SEQ ID NO: 28400 - protein, 480 aa, synthetic construct; identical to SEQ ID NO: 2870
  REGION 1..480: note = Description of Artificial Sequence: Synthetic polypeptide
  REGION 1..480: note = XENP022931 [ICOS]_H0.35_L0.36_Fab-1G6_L1.194_H1.279 scFv-Fc Heavy Chain

SEQ ID NO: 28401 - protein, 214 aa, synthetic construct; identical to SEQ ID NO: 26517
  REGION 1..214: note = Description of Artificial Sequence: Synthetic polypeptide
  REGION 1..214: note = XENP022931 [ICOS]_H0.35_L0.36_Fab-1G6_L1.194_H1.279 Light Chain

SEQ ID NO: 28402 - protein, 454 aa, synthetic construct; identical to SEQ ID NO: 28186
  REGION 1..454: note = Description of Artificial Sequence: Synthetic polypeptide
  REGION 1..454: note = XENP022932 [ICOS]_H0.61_L0.36_Fab-1G6_L1.194_H1.279 Fab-Fc Heavy Chain

SEQ ID NO: 28403 - protein, 480 aa, synthetic construct; identical to SEQ ID NO: 2870
  REGION 1..480: note = Description of Artificial Sequence: Synthetic polypeptide
  REGION 1..480: note = XENP022932 [ICOS]_H0.61_L0.36_Fab-1G6_L1.194_H1.279 scFv-Fc Heavy Chain

SEQ ID NO: 28404 - protein, 214 aa, synthetic construct; identical to SEQ ID NO: 26517
  REGION 1..214: note = Description of Artificial Sequence: Synthetic polypeptide
  REGION 1..214: note = XENP022932 [ICOS]_H0.61_L0.36_Fab-1G6_L1.194_H1.279 Light Chain

SEQ ID NO: 28405 - protein, 454 aa, synthetic construct; identical to SEQ ID NO: 26362
  REGION 1..454: note = Description of Artificial Sequence: Synthetic polypeptide
  REGION 1..454: note = XENP022935 [ICOS]_H0_L0.36_Fab-1G6_L1.194_H1.279 Fab-Fc Heavy Chain

SEQ ID NO: 28406 - protein, 480 aa, synthetic construct; identical to SEQ ID NO: 2930
  REGION 1..480: note = Description of Artificial Sequence: Synthetic polypeptide
  REGION 1..480: note = XENP022935 [ICOS]_H0_L0.36_Fab-1G6_L1.194_H1.279 scFv-Fc Heavy Chain

SEQ ID NO: 28407 - protein, 214 aa, synthetic construct; identical to SEQ ID NO: 26517
  REGION 1..214: note = Description of Artificial Sequence: Synthetic polypeptide
  REGION 1..214: note = XENP022935 [ICOS]_H0_L0.36_Fab-1G6_L1.194_H1.279 Light Chain

SEQ ID NO: 28408 - protein, 454 aa, synthetic construct
  REGION 1..454: note = Description of Artificial Sequence: Synthetic polypeptide
  REGION 1..454: note = XENP022936 [ICOS]_H0.35_L0.36_Fab-1G6_L1.194_H1.279 Fab-Fc Heavy Chain
QVQLVQSGAEVKKPGASVKVSCKASGYTFTGYYMHWVRQAPGQGLEWMGWINPHSGGTNYAQKFQGRVTMTRDTSISTAYMELSRLRSDDTAVYYCARTYYYDTSGYYHDAFDVWGQGTMVTVSSASTKGPSVFPLAPSSKSTSGGTAALGCLVKDYFPEPVTVSWNSGALTSGVHTFPAVLQSSGLYSLSSVVTVPSSSLGTQTYICNVNHKPSDTKVDKKVEPKSCDKTHTCPPCPAPPVAGPSVFLFPPKPKDTLMISRTPEVTCVVVDVKHEDPEVKFNWYVDGVEVHNAKTKPREEEYNSTYRVVSVLTVLHQDWLNGKEYKCKVSNKALPAPIEKTISKAKGQPREPQVYTLPPSREEMTKNQVSLTCDVSGFYPSDIAVEWESDGQPENNYKTTPPVLDSDGSFFLYSKLTVDKSRWEQGDVFSCSVLHEALHSHYTQKSLSLSPGK

SEQ ID NO: 28409 - protein, 480 aa, synthetic construct; identical to SEQ ID NO: 2930
  REGION 1..480: note = Description of Artificial Sequence: Synthetic polypeptide
  REGION 1..480: note = XENP022936 [ICOS]_H0.35_L0.36_Fab-1G6_L1.194_H1.279 scFv-Fc Heavy Chain

SEQ ID NO: 28410 - protein, 214 aa, synthetic construct; identical to SEQ ID NO: 26517
  REGION 1..214: note = Description of Artificial Sequence: Synthetic polypeptide
  REGION 1..214: note = XENP022936 [ICOS]_H0.35_L0.36_Fab-1G6_L1.194_H1.279 Light Chain

SEQ ID NO: 28411 - protein, 454 aa, synthetic construct
  REGION 1..454: note = Description of Artificial Sequence: Synthetic polypeptide
  REGION 1..454: note = XENP022937 [ICOS]_H0.61_L0.36_Fab-1G6_L1.194_H1.279 Fab-Fc Heavy Chain
QVQLVQSGAEVKKPGASVKVSCKASGYTFTGYYMHWVRQAPGQGLEWMGIINPHSGGTNYAQKFQGRVTMTRDTSISTAYMELSRLRSDDTAVYYCARTYYYDTSGYYHDAFDVWGQGTMVTVSSASTKGPSVFPLAPSSKSTSGGTAALGCLVKDYFPEPVTVSWNSGALTSGVHTFPAVLQSSGLYSLSSVVTVPSSSLGTQTYICNVNHKPSDTKVDKKVEPKSCDKTHTCPPCPAPPVAGPSVFLFPPKPKDTLMISRTPEVTCVVVDVKHEDPEVKFNWYVDGVEVHNAKTKPREEEYNSTYRVVSVLTVLHQDWLNGKEYKCKVSNKALPAPIEKTISKAKGQPREPQVYTLPPSREEMTKNQVSLTCDVSGFYPSDIAVEWESDGQPENNYKTTPPVLDSDGSFFLYSKLTVDKSRWEQGDVFSCSVLHEALHSHYTQKSLSLSPGK

SEQ ID NO: 28412 - protein, 480 aa, synthetic construct; identical to SEQ ID NO: 2930
  REGION 1..480: note = Description of Artificial Sequence: Synthetic polypeptide
  REGION 1..480: note = XENP022937 [ICOS]_H0.61_L0.36_Fab-1G6_L1.194_H1.279 scFv-Fc Heavy Chain

SEQ ID NO: 28413 - protein, 214 aa, synthetic construct; identical to SEQ ID NO: 26517
  REGION 1..214: note = Description of Artificial Sequence: Synthetic polypeptide
  REGION 1..214: note = XENP022937 [ICOS]_H0.61_L0.36_Fab-1G6_L1.194_H1.279 Light Chain

SEQ ID NO: 28414 - protein, 454 aa, synthetic construct; identical to SEQ ID NO: 28198
  REGION 1..454: note = Description of Artificial Sequence: Synthetic polypeptide
  REGION 1..454: note = XENP022950 [ICOS]_H0.24_L0.37_Fab-1G6_L1.194_H1.279 Fab-Fc Heavy Chain

SEQ ID NO: 28415 - protein, 480 aa, synthetic construct; identical to SEQ ID NO: 2870
  REGION 1..480: note = Description of Artificial Sequence: Synthetic polypeptide
  REGION 1..480: note = XENP022950 [ICOS]_H0.24_L0.37_Fab-1G6_L1.194_H1.279 scFv-Fc Heavy Chain

SEQ ID NO: 28416 - protein, 214 aa, synthetic construct; identical to SEQ ID NO: 26537
  REGION 1..214: note = Description of Artificial Sequence: Synthetic polypeptide
  REGION 1..214: note = XENP022950 [ICOS]_H0.24_L0.37_Fab-1G6_L1.194_H1.279 Light Chain

SEQ ID NO: 28417 - protein, 454 aa, synthetic construct; identical to SEQ ID NO: 28201
  REGION 1..454: note = Description of Artificial Sequence: Synthetic polypeptide
  REGION 1..454: note = XENP022951 [ICOS]_H0.37_L0.37_Fab-1G6_L1.194_H1.279 Fab-Fc Heavy Chain

SEQ ID NO: 28418 - protein, 480 aa, synthetic construct; identical to SEQ ID NO: 2870
  REGION 1..480: note = Description of Artificial Sequence: Synthetic polypeptide
  REGION 1..480: note = XENP022951 [ICOS]_H0.37_L0.37_Fab-1G6_L1.194_H1.279 scFv-Fc Heavy Chain

SEQ ID NO: 28419 - protein, 214 aa, synthetic construct; identical to SEQ ID NO: 26537
  REGION 1..214: note = Description of Artificial Sequence: Synthetic polypeptide
  REGION 1..214: note = XENP022951 [ICOS]_H0.37_L0.37_Fab-1G6_L1.194_H1.279 Light Chain

SEQ ID NO: 28420 - protein, 454 aa, synthetic construct; identical to SEQ ID NO: 28204
  REGION 1..454: note = Description of Artificial Sequence: Synthetic polypeptide
  REGION 1..454: note = XENP022952 [ICOS]_H0.40_L0.37_Fab-1G6_L1.194_H1.279 Fab-Fc Heavy Chain

SEQ ID NO: 28421 - protein, 480 aa, synthetic construct; identical to SEQ ID NO: 2870
  REGION 1..480: note = Description of Artificial Sequence: Synthetic polypeptide
  REGION 1..480: note = XENP022952 [ICOS]_H0.40_L0.37_Fab-1G6_L1.194_H1.279 scFv-Fc Heavy Chain

SEQ ID NO: 28422 - protein, 214 aa, synthetic construct; identical to SEQ ID NO: 26537
  REGION 1..214: note = Description of Artificial Sequence: Synthetic polypeptide
  REGION 1..214: note = XENP022952 [ICOS]_H0.40_L0.37_Fab-1G6_L1.194_H1.279 Light Chain

SEQ ID NO: 28423 - protein, 454 aa, synthetic construct; identical to SEQ ID NO: 28207
  REGION 1..454: note = Description of Artificial Sequence: Synthetic polypeptide
  REGION 1..454: note = XENP022953 [ICOS]_H0.44_L0.37_Fab-1G6_L1.194_H1.279 Fab-Fc Heavy Chain

SEQ ID NO: 28424 - protein, 480 aa, synthetic construct; identical to SEQ ID NO: 2870
  REGION 1..480: note = Description of Artificial Sequence: Synthetic polypeptide
  REGION 1..480: note = XENP022953 [ICOS]_H0.44_L0.37_Fab-1G6_L1.194_H1.279 scFv-Fc Heavy Chain

SEQ ID NO: 28425 - protein, 214 aa, synthetic construct; identical to SEQ ID NO: 26537
  REGION 1..214: note = Description of Artificial Sequence: Synthetic polypeptide
  REGION 1..214: note = XENP022953 [ICOS]_H0.44_L0.37_Fab-1G6_L1.194_H1.279 Light Chain

SEQ ID NO: 28426 - protein, 454 aa, synthetic construct; identical to SEQ ID NO: 28210
  REGION 1..454: note = Description of Artificial Sequence: Synthetic polypeptide
  REGION 1..454: note = XENP022954 [ICOS]_H0.56_L0.37_Fab-1G6_L1.194_H1.279 Fab-Fc Heavy Chain

SEQ ID NO: 28427 - protein, 480 aa, synthetic construct; identical to SEQ ID NO: 2870
  REGION 1..480: note = Description of Artificial Sequence: Synthetic polypeptide
  REGION 1..480: note = XENP022954 [ICOS]_H0.56_L0.37_Fab-1G6_L1.194_H1.279 scFv-Fc Heavy Chain

SEQ ID NO: 28428 - protein, 214 aa, synthetic construct; identical to SEQ ID NO: 26537
  REGION 1..214: note = Description of Artificial Sequence: Synthetic polypeptide
  REGION 1..214: note = XENP022954 [ICOS]_H0.56_L0.37_Fab-1G6_L1.194_H1.279 Light Chain

SEQ ID NO: 28429 - protein, 454 aa, synthetic construct; identical to SEQ ID NO: 28213
  REGION 1..454: note = Description of Artificial Sequence: Synthetic polypeptide
  REGION 1..454: note = XENP022955 [ICOS]_H0.62_L0.37_Fab-1G6_L1.194_H1.279 Fab-Fc Heavy Chain

SEQ ID NO: 28430 - protein, 480 aa, synthetic construct; identical to SEQ ID NO: 2870
  REGION 1..480: note = Description of Artificial Sequence: Synthetic polypeptide
  REGION 1..480: note = XENP022955 [ICOS]_H0.62_L0.37_Fab-1G6_L1.194_H1.279 scFv-Fc Heavy Chain

SEQ ID NO: 28431 - protein, 214 aa, synthetic construct; identical to SEQ ID NO: 26537
  REGION 1..214: note = Description of Artificial Sequence: Synthetic polypeptide
  REGION 1..214: note = XENP022955 [ICOS]_H0.62_L0.37_Fab-1G6_L1.194_H1.279 Light Chain

SEQ ID NO: 28432 - protein, 454 aa, synthetic construct; identical to SEQ ID NO: 28174
  REGION 1..454: note = Description of Artificial Sequence: Synthetic polypeptide
  REGION 1..454: note = XENP022956 [ICOS]_H0.35_L0.34_Fab-1G6_L1.194_H1.279 Fab-Fc Heavy Chain

SEQ ID NO: 28433 - protein, 480 aa, synthetic construct; identical to SEQ ID NO: 2870
  REGION 1..480: note = Description of Artificial Sequence: Synthetic polypeptide
  REGION 1..480: note = XENP022956 [ICOS]_H0.35_L0.34_Fab-1G6_L1.194_H1.279 scFv-Fc Heavy Chain

SEQ ID NO: 28434 - protein, 214 aa, synthetic construct; identical to SEQ ID NO: 26497
  REGION 1..214: note = Description of Artificial Sequence: Synthetic polypeptide
  REGION 1..214: note = XENP022956 [ICOS]_H0.35_L0.34_Fab-1G6_L1.194_H1.279 Light Chain

SEQ ID NO: 28435 - protein, 454 aa, synthetic construct; identical to SEQ ID NO: 28174
  REGION 1..454: note = Description of Artificial Sequence: Synthetic polypeptide
  REGION 1..454: note = XENP022957 [ICOS]_H0.35_L0.35_Fab-1G6_L1.194_H1.279 Fab-Fc Heavy Chain

SEQ ID NO: 28436 - protein, 480 aa, synthetic construct; identical to SEQ ID NO: 2870
  REGION 1..480: note = Description of Artificial Sequence: Synthetic polypeptide
  REGION 1..480: note = XENP022957 [ICOS]_H0.35_L0.35_Fab-1G6_L1.194_H1.279 scFv-Fc Heavy Chain

SEQ ID NO: 28437 - protein, 214 aa, synthetic construct; identical to SEQ ID NO: 28008
  REGION 1..214: note = Description of Artificial Sequence: Synthetic polypeptide
  REGION 1..214: note = XENP022957 [ICOS]_H0.35_L0.35_Fab-1G6_L1.194_H1.279 Light Chain

SEQ ID NO: 28438 - protein, 454 aa, synthetic construct; identical to SEQ ID NO: 28174
  REGION 1..454: note = Description of Artificial Sequence: Synthetic polypeptide
  REGION 1..454: note = XENP022958 [ICOS]_H0.35_L0.37_Fab-1G6_L1.194_H1.279 Fab-Fc Heavy Chain

SEQ ID NO: 28439 - protein, 480 aa, synthetic construct; identical to SEQ ID NO: 2870
  REGION 1..480: note = Description of Artificial Sequence: Synthetic polypeptide
  REGION 1..480: note = XENP022958 [ICOS]_H0.35_L0.37_Fab-1G6_L1.194_H1.279 scFv-Fc Heavy Chain

SEQ ID NO: 28440 - protein, 214 aa, synthetic construct; identical to SEQ ID NO: 26537
  REGION 1..214: note = Description of Artificial Sequence: Synthetic polypeptide
  REGION 1..214: note = XENP022958 [ICOS]_H0.35_L0.37_Fab-1G6_L1.194_H1.279 Light Chain

SEQ ID NO: 28441 - protein, 454 aa, synthetic construct; identical to SEQ ID NO: 28186
  REGION 1..454: note = Description of Artificial Sequence: Synthetic polypeptide
  REGION 1..454: note = XENP022959 [ICOS]_H0.61_L0.34_Fab-1G6_L1.194_H1.279 Fab-Fc Heavy Chain

SEQ ID NO: 28442 - protein, 480 aa, synthetic construct; identical to SEQ ID NO: 2870
  REGION 1..480: note = Description of Artificial Sequence: Synthetic polypeptide
  REGION 1..480: note = XENP022959 [ICOS]_H0.61_L0.34_Fab-1G6_L1.194_H1.279 scFv-Fc Heavy Chain

SEQ ID NO: 28443 - protein, 214 aa, synthetic construct; identical to SEQ ID NO: 26497
  REGION 1..214: note = Description of Artificial Sequence: Synthetic polypeptide
  REGION 1..214: note = XENP022959 [ICOS]_H0.61_L0.34_Fab-1G6_L1.194_H1.279 Light Chain

SEQ ID NO: 28444 - protein, 454 aa, synthetic construct; identical to SEQ ID NO: 28186
  REGION 1..454: note = Description of Artificial Sequence: Synthetic polypeptide
  REGION 1..454: note = XENP022960 [ICOS]_H0.61_L0.35_Fab-1G6_L1.194_H1.279 Fab-Fc Heavy Chain

SEQ ID NO: 28445 - protein, 480 aa, synthetic construct; identical to SEQ ID NO: 2870
  REGION 1..480: note = Description of Artificial Sequence: Synthetic polypeptide
  REGION 1..480: note = XENP022960 [ICOS]_H0.61_L0.35_Fab-1G6_L1.194_H1.279 scFv-Fc Heavy Chain

SEQ ID NO: 28446 - protein, 214 aa, synthetic construct; identical to SEQ ID NO: 28008
  REGION 1..214: note = Description of Artificial Sequence: Synthetic polypeptide
  REGION 1..214: note = XENP022960 [ICOS]_H0.61_L0.35_Fab-1G6_L1.194_H1.279 Light Chain

SEQ ID NO: 28447 - protein, 454 aa, synthetic construct; identical to SEQ ID NO: 28186
  REGION 1..454: note = Description of Artificial Sequence: Synthetic polypeptide
  REGION 1..454: note = XENP022961 [ICOS]_H0.61_L0.37_Fab-1G6_L1.194_H1.279 Fab-Fc Heavy Chain

SEQ ID NO: 28448 - protein, 480 aa, synthetic construct; identical to SEQ ID NO: 2870
  REGION 1..480: note = Description of Artificial Sequence: Synthetic polypeptide
  REGION 1..480: note = XENP022961 [ICOS]_H0.61_L0.37_Fab-1G6_L1.194_H1.279 scFv-Fc Heavy Chain

SEQ ID NO: 28449 - protein, 214 aa, synthetic construct; identical to SEQ ID NO: 26537
  REGION 1..214: note = Description of Artificial Sequence: Synthetic polypeptide
  REGION 1..214: note = XENP022961 [ICOS]_H0.61_L0.37_Fab-1G6_L1.194_H1.279 Light Chain

SEQ ID NO: 28450 - protein, 454 aa, synthetic construct; identical to SEQ ID NO: 28201
  REGION 1..454: note = Description of Artificial Sequence: Synthetic polypeptide
  REGION 1..454: note = XENP023090 [ICOS]_H0.37_L0_Fab-1G6_L1.194_H1.279 Fab-Fc Heavy Chain

SEQ ID NO: 28451 - protein, 480 aa, synthetic construct; identical to SEQ ID NO: 2870
  REGION 1..480: note = Description of Artificial Sequence: Synthetic polypeptide
  REGION 1..480: note = XENP023090 [ICOS]_H0.37_L0_Fab-1G6_L1.194_H1.279 scFv-Fc Heavy Chain

SEQ ID NO: 28452 - protein, 214 aa, synthetic construct; identical to SEQ ID NO: 26297
  REGION 1..214: note = Description of Artificial Sequence: Synthetic polypeptide
  REGION 1..214: note = XENP023090 [ICOS]_H0.37_L0_Fab-1G6_L1.194_H1.279 Light Chain

SEQ ID NO: 28453 - protein, 454 aa, synthetic construct; identical to SEQ ID NO: 28261
  REGION 1..454: note = Description of Artificial Sequence: Synthetic polypeptide
  REGION 1..454: note = XENP023091 [ICOS]_H0.64_L0_Fab-1G6_L1.194_H1.279 Fab-Fc Heavy Chain

SEQ ID NO: 28454 - protein, 480 aa, synthetic construct; identical to SEQ ID NO: 2870
  REGION 1..480: note = Description of Artificial Sequence: Synthetic polypeptide
  REGION 1..480: note = XENP023091 [ICOS]_H0.64_L0_Fab-1G6_L1.194_H1.279 scFv-Fc Heavy Chain

SEQ ID NO: 28455 - protein, 214 aa, synthetic construct; identical to SEQ ID NO: 26297
  REGION 1..214: note = Description of Artificial Sequence: Synthetic polypeptide
  REGION 1..214: note = XENP023091 [ICOS]_H0.64_L0_Fab-1G6_L1.194_H1.279 Light Chain

SEQ ID NO: 28456 - protein, 454 aa, synthetic construct; identical to SEQ ID NO: 26562
  REGION 1..454: note = Description of Artificial Sequence: Synthetic polypeptide
  REGION 1..454: note = XENP023092 [ICOS]_H0.66_L0_Fab-1G6_L1.194_H1.279 Fab-Fc Heavy Chain

SEQ ID NO: 28457 - protein, 480 aa, synthetic construct; identical to SEQ ID NO: 2870
  REGION 1..480: note = Description of Artificial Sequence: Synthetic polypeptide
  REGION 1..480: note = XENP023092 [ICOS]_H0.66_L0_Fab-1G6_L1.194_H1.279 scFv-Fc Heavy Chain

SEQ ID NO: 28458 - protein, 214 aa, synthetic construct; identical to SEQ ID NO: 26297
  REGION 1..214: note = Description of Artificial Sequence: Synthetic polypeptide
  REGION 1..214: note = XENP023092 [ICOS]_H0.66_L0_Fab-1G6_L1.194_H1.279 Light Chain

SEQ ID NO: 28459 - protein, 454 aa, synthetic construct; identical to SEQ ID NO: 28267
  REGION 1..454: note = Description of Artificial Sequence: Synthetic polypeptide
  REGION 1..454: note = XENP023093 [ICOS]_H0.67_L0_Fab-1G6_L1.194_H1.279 Fab-Fc Heavy Chain

SEQ ID NO: 28460 - protein, 480 aa, synthetic construct; identical to SEQ ID NO: 2870
  REGION 1..480: note = Description of Artificial Sequence: Synthetic polypeptide
  REGION 1..480: note = XENP023093 [ICOS]_H0.67_L0_Fab-1G6_L1.194_H1.279 scFv-Fc Heavy Chain

SEQ ID NO: 28461 - protein, 214 aa, synthetic construct; identical to SEQ ID NO: 26297
  REGION 1..214: note = Description of Artificial Sequence: Synthetic polypeptide
  REGION 1..214: note = XENP023093 [ICOS]_H0.67_L0_Fab-1G6_L1.194_H1.279 Light Chain

SEQ ID NO: 28462 - protein, 454 aa, synthetic construct; identical to SEQ ID NO: 26562
  REGION 1..454: note = Description of Artificial Sequence: Synthetic polypeptide
  REGION 1..454: note = XENP023410 [ICOS]_H0.66_L0.34_Fab-1G6_L1.194_H1.279 Fab-Fc Heavy Chain

SEQ ID NO: 28463 - protein, 480 aa, synthetic construct; identical to SEQ ID NO: 2870
  REGION 1..480: note = Description of Artificial Sequence: Synthetic polypeptide
  REGION 1..480: note = XENP023410 [ICOS]_H0.66_L0.34_Fab-1G6_L1.194_H1.279 scFv-Fc Heavy Chain

SEQ ID NO: 28464 - protein, 214 aa, synthetic construct; identical to SEQ ID NO: 26497
  REGION 1..214: note = Description of Artificial Sequence: Synthetic polypeptide
  REGION 1..214: note = XENP023410 [ICOS]_H0.66_L0.34_Fab-1G6_L1.194_H1.279 Light Chain

SEQ ID NO: 28465 - protein, 454 aa, synthetic construct; identical to SEQ ID NO: 26362
  REGION 1..454: note = Description of Artificial Sequence: Synthetic polypeptide
  REGION 1..454: note = XENP022730 [ICOS]_H0L0 _Fab-1G6_L1.194_H1.279 Fab-Fc Heavy Chain

SEQ ID NO: 28466 - protein, 480 aa, synthetic construct; identical to SEQ ID NO: 2930
  REGION 1..480: note = Description of Artificial Sequence: Synthetic polypeptide
  REGION 1..480: note = XENP022730 [ICOS]_H0L0 _Fab-1G6_L1.194_H1.279 scFv-Fc Heavy Chain

SEQ ID NO: 28467 - protein, 214 aa, synthetic construct; identical to SEQ ID NO: 26297
  REGION 1..214: note = Description of Artificial Sequence: Synthetic polypeptide
  REGION 1..214: note = XENP022730 [ICOS]_H0L0_Fab-1G6_L1.194_H1.279 Light Chain

SEQ ID NO: 28468 - protein, 454 aa, synthetic construct; identical to SEQ ID NO: 26362
  REGION 1..454: note = Description of Artificial Sequence: Synthetic polypeptide
  REGION 1..454: note = XENP022917 [ICOS]_H0_L0.38_Fab-1G6_L1.194_H1.279 Fab-Fc Heavy Chain

SEQ ID NO: 28469 - protein, 480 aa, synthetic construct; identical to SEQ ID NO: 2930
  REGION 1..480: note = Description of Artificial Sequence: Synthetic polypeptide
  REGION 1..480: note = XENP022917 [ICOS]_H0_L0.38_Fab-1G6_L1.194_H1.279 scFv-Fc Heavy Chain

SEQ ID NO: 28470 - protein, 214 aa, synthetic construct; identical to SEQ ID NO: 26557
  REGION 1..214: note = Description of Artificial Sequence: Synthetic polypeptide
  REGION 1..214: note = XENP022917 [ICOS]_H0_L0.38_Fab-1G6_L1.194_H1.279 Light Chain

SEQ ID NO: 28471 - protein, 454 aa, synthetic construct; identical to SEQ ID NO: 26362
  REGION 1..454: note = Description of Artificial Sequence: Synthetic polypeptide
  REGION 1..454: note = XENP022918 [ICOS]_H0_L0.42_Fab-1G6_L1.194_H1.279 Fab-Fc Heavy Chain

SEQ ID NO: 28472 - protein, 480 aa, synthetic construct; identical to SEQ ID NO: 2930
  REGION 1..480: note = Description of Artificial Sequence: Synthetic polypeptide
  REGION 1..480: note = XENP022918 [ICOS]_H0_L0.42_Fab-1G6_L1.194_H1.279 scFv-Fc Heavy Chain

SEQ ID NO: 28473 - protein, 214 aa, synthetic construct; identical to SEQ ID NO: 28016
  REGION 1..214: note = Description of Artificial Sequence: Synthetic polypeptide
  REGION 1..214: note = XENP022918 [ICOS]_H0_L0.42_Fab-1G6_L1.194_H1.279 Light Chain

SEQ ID NO: 28474 - protein, 454 aa, synthetic construct; identical to SEQ ID NO: 26362
  REGION 1..454: note = Description of Artificial Sequence: Synthetic polypeptide
  REGION 1..454: note = XENP022919 [ICOS]_H0_L0.43_Fab-1G6_L1.194_H1.279 Fab-Fc Heavy Chain

SEQ ID NO: 28475 - protein, 480 aa, synthetic construct; identical to SEQ ID NO: 2930
  REGION 1..480: note = Description of Artificial Sequence: Synthetic polypeptide
  REGION 1..480: note = XENP022919 [ICOS]_H0_L0.43_Fab-1G6_L1.194_H1.279 scFv-Fc Heavy Chain

SEQ ID NO: 28476 - protein, 214 aa, synthetic construct; identical to SEQ ID NO: 28018
  REGION 1..214: note = Description of Artificial Sequence: Synthetic polypeptide
  REGION 1..214: note = XENP022919 [ICOS]_H0_L0.43_Fab-1G6_L1.194_H1.279 Light Chain

SEQ ID NO: 28477 - protein, 454 aa, synthetic construct; identical to SEQ ID NO: 26362
  REGION 1..454: note = Description of Artificial Sequence: Synthetic polypeptide
  REGION 1..454: note = XENP022920 [ICOS]_H0_L0.44_Fab-1G6_L1.194_H1.279 Fab-Fc Heavy Chain

SEQ ID NO: 28478 - protein, 480 aa, synthetic construct; identical to SEQ ID NO: 2930
  REGION 1..480: note = Description of Artificial Sequence: Synthetic polypeptide
  REGION 1..480: note = XENP022920 [ICOS]_H0_L0.44_Fab-1G6_L1.194_H1.279 scFv-Fc Heavy Chain

SEQ ID NO: 28479 - protein, 214 aa, synthetic construct; identical to SEQ ID NO: 28020
  REGION 1..214: note = Description of Artificial Sequence: Synthetic polypeptide
  REGION 1..214: note = XENP022920 [ICOS]_H0_L0.44_Fab-1G6_L1.194_H1.279 Light Chain

SEQ ID NO: 28480 - protein, 454 aa, synthetic construct; identical to SEQ ID NO: 28408
  REGION 1..454: note = Description of Artificial Sequence: Synthetic polypeptide
  REGION 1..454: note = XENP022921 [ICOS]_H0.35_L0.38_Fab-1G6_L1.194_H1.279 Fab-Fc Heavy Chain

SEQ ID NO: 28481 - protein, 480 aa, synthetic construct; identical to SEQ ID NO: 2930
  REGION 1..480: note = Description of Artificial Sequence: Synthetic polypeptide
  REGION 1..480: note = XENP022921 [ICOS]_H0.35_L0.38_Fab-1G6_L1.194_H1.279 scFv-Fc Heavy Chain

SEQ ID NO: 28482 - protein, 214 aa, synthetic construct; identical to SEQ ID NO: 26557
  REGION 1..214: note = Description of Artificial Sequence: Synthetic polypeptide
  REGION 1..214: note = XENP022921 [ICOS]_H0.35_L0.38_Fab-1G6_L1.194_H1.279 Light Chain

SEQ ID NO: 28483 - protein, 454 aa, synthetic construct; identical to SEQ ID NO: 28408
  REGION 1..454: note = Description of Artificial Sequence: Synthetic polypeptide
  REGION 1..454: note = XENP022922 [ICOS]_H0.35_L0.42_Fab-1G6_L1.194_H1.279 Fab-Fc Heavy Chain

SEQ ID NO: 28484 - protein, 480 aa, synthetic construct; identical to SEQ ID NO: 2930
  REGION 1..480: note = Description of Artificial Sequence: Synthetic polypeptide
  REGION 1..480: note = XENP022922 [ICOS]_H0.35_L0.42_Fab-1G6_L1.194_H1.279 scFv-Fc Heavy Chain

SEQ ID NO: 28485 - protein, 214 aa, synthetic construct; identical to SEQ ID NO: 28016
  REGION 1..214: note = Description of Artificial Sequence: Synthetic polypeptide
  REGION 1..214: note = XENP022922 [ICOS]_H0.35_L0.42_Fab-1G6_L1.194_H1.279 Light Chain

SEQ ID NO: 28486 - protein, 454 aa, synthetic construct; identical to SEQ ID NO: 28408
  REGION 1..454: note = Description of Artificial Sequence: Synthetic polypeptide
  REGION 1..454: note = XENP022923 [ICOS]_H0.35_L0.43_Fab-1G6_L1.194_H1.279 Fab-Fc Heavy Chain

SEQ ID NO: 28487 - protein, 480 aa, synthetic construct; identical to SEQ ID NO: 2930
  REGION 1..480: note = Description of Artificial Sequence: Synthetic polypeptide
  REGION 1..480: note = XENP022923 [ICOS]_H0.35_L0.43_Fab-1G6_L1.194_H1.279 scFv-Fc Heavy Chain

SEQ ID NO: 28488 - protein, 214 aa, synthetic construct; identical to SEQ ID NO: 28018
  REGION 1..214: note = Description of Artificial Sequence: Synthetic polypeptide
  REGION 1..214: note = XENP022923 [ICOS]_H0.35_L0.43_Fab-1G6_L1.194_H1.279 Light Chain

SEQ ID NO: 28489 - protein, 454 aa, synthetic construct; identical to SEQ ID NO: 28408
  REGION 1..454: note = Description of Artificial Sequence: Synthetic polypeptide
  REGION 1..454: note = XENP022924 [ICOS]_H0.35_L0.44_Fab-1G6_L1.194_H1.279 Fab-Fc Heavy Chain

SEQ ID NO: 28490 - protein, 480 aa, synthetic construct; identical to SEQ ID NO: 2930
  REGION 1..480: note = Description of Artificial Sequence: Synthetic polypeptide
  REGION 1..480: note = XENP022924 [ICOS]_H0.35_L0.44_Fab-1G6_L1.194_H1.279 scFv-Fc Heavy Chain

SEQ ID NO: 28491 - protein, 214 aa, synthetic construct; identical to SEQ ID NO: 28020
  REGION 1..214: note = Description of Artificial Sequence: Synthetic polypeptide
  REGION 1..214: note = XENP022924 [ICOS]_H0.35_L0.44_Fab-1G6_L1.194_H1.279 Light Chain

SEQ ID NO: 28492 - protein, 454 aa, synthetic construct; identical to SEQ ID NO: 28411
  REGION 1..454: note = Description of Artificial Sequence: Synthetic polypeptide
  REGION 1..454: note = XENP022925 [ICOS]_H0.61_L0.38_Fab-1G6_L1.194_H1.279 Fab-Fc Heavy Chain

SEQ ID NO: 28493 - protein, 480 aa, synthetic construct; identical to SEQ ID NO: 2930
  REGION 1..480: note = Description of Artificial Sequence: Synthetic polypeptide
  REGION 1..480: note = XENP022925 [ICOS]_H0.61_L0.38_Fab-1G6_L1.194_H1.279 scFv-Fc Heavy Chain

SEQ ID NO: 28494 - protein, 214 aa, synthetic construct; identical to SEQ ID NO: 26557
  REGION 1..214: note = Description of Artificial Sequence: Synthetic polypeptide
  REGION 1..214: note = XENP022925 [ICOS]_H0.61_L0.38_Fab-1G6_L1.194_H1.279 Light Chain

SEQ ID NO: 28495 - protein, 454 aa, synthetic construct; identical to SEQ ID NO: 28411
  REGION 1..454: note = Description of Artificial Sequence: Synthetic polypeptide
  REGION 1..454: note = XENP022926 [ICOS]_H0.61_L0.42_Fab-1G6_L1.194_H1.279 Fab-Fc Heavy Chain

SEQ ID NO: 28496 - protein, 480 aa, synthetic construct; identical to SEQ ID NO: 2930
  REGION 1..480: note = Description of Artificial Sequence: Synthetic polypeptide
  REGION 1..480: note = XENP022926 [ICOS]_H0.61_L0.42_Fab-1G6_L1.194_H1.279 scFv-Fc Heavy Chain

SEQ ID NO: 28497 - protein, 214 aa, synthetic construct; identical to SEQ ID NO: 28016
  REGION 1..214: note = Description of Artificial Sequence: Synthetic polypeptide
  REGION 1..214: note = XENP022926 [ICOS]_H0.61_L0.42_Fab-1G6_L1.194_H1.279 Light Chain

SEQ ID NO: 28498 - protein, 454 aa, synthetic construct; identical to SEQ ID NO: 28411
  REGION 1..454: note = Description of Artificial Sequence: Synthetic polypeptide
  REGION 1..454: note = XENP022927 [ICOS]_H0.61_L0.43_Fab-1G6_L1.194_H1.279 Fab-Fc Heavy Chain

SEQ ID NO: 28499 - protein, 480 aa, synthetic construct; identical to SEQ ID NO: 2930
  REGION 1..480: note = Description of Artificial Sequence: Synthetic polypeptide
  REGION 1..480: note = XENP022927 [ICOS]_H0.61_L0.43_Fab-1G6_L1.194_H1.279 scFv-Fc Heavy Chain

SEQ ID NO: 28500 - protein, 214 aa, synthetic construct; identical to SEQ ID NO: 28018
  REGION 1..214: note = Description of Artificial Sequence: Synthetic polypeptide
  REGION 1..214: note = XENP022927 [ICOS]_H0.61_L0.43_Fab-1G6_L1.194_H1.279 Light Chain

SEQ ID NO: 28501 - protein, 454 aa, synthetic construct; identical to SEQ ID NO: 28411
  REGION 1..454: note = Description of Artificial Sequence: Synthetic polypeptide
  REGION 1..454: note = XENP022928 [ICOS]_H0.61_L0.44_Fab-1G6_L1.194_H1.279 Fab-Fc Heavy Chain

SEQ ID NO: 28502 - protein, 480 aa, synthetic construct; identical to SEQ ID NO: 2930
  REGION 1..480: note = Description of Artificial Sequence: Synthetic polypeptide
  REGION 1..480: note = XENP022928 [ICOS]_H0.61_L0.44_Fab-1G6_L1.194_H1.279 scFv-Fc Heavy Chain

SEQ ID NO: 28503 - protein, 214 aa, synthetic construct; identical to SEQ ID NO: 28020
  REGION 1..214: note = Description of Artificial Sequence: Synthetic polypeptide
  REGION 1..214: note = XENP022928 [ICOS]_H0.61_L0.44_Fab-1G6_L1.194_H1.279 Light Chain

SEQ ID NO: 28504 - protein, 454 aa, synthetic construct; identical to SEQ ID NO: 26362
  REGION 1..454: note = Description of Artificial Sequence: Synthetic polypeptide
  REGION 1..454: note = XENP022935 [ICOS]_H0_L0.36_Fab-1G6_L1.194_H1.279 Fab-Fc Heavy Chain

SEQ ID NO: 28505 - protein, 480 aa, synthetic construct; identical to SEQ ID NO: 2930
  REGION 1..480: note = Description of Artificial Sequence: Synthetic polypeptide
  REGION 1..480: note = XENP022935 [ICOS]_H0_L0.36_Fab-1G6_L1.194_H1.279 scFv-Fc Heavy Chain

SEQ ID NO: 28506 - protein, 214 aa, synthetic construct; identical to SEQ ID NO: 26517
  REGION 1..214: note = Description of Artificial Sequence: Synthetic polypeptide
  REGION 1..214: note = XENP022935 [ICOS]_H0_L0.36_Fab-1G6_L1.194_H1.279 Light Chain

SEQ ID NO: 28507 - protein, 454 aa, synthetic construct; identical to SEQ ID NO: 28408
  REGION 1..454: note = Description of Artificial Sequence: Synthetic polypeptide
  REGION 1..454: note = XENP022936 [ICOS]_H0.35_L0.36_Fab-1G6_L1.194_H1.279 Fab-Fc Heavy Chain

SEQ ID NO: 28508 - protein, 480 aa, synthetic construct; identical to SEQ ID NO: 2930
  REGION 1..480: note = Description of Artificial Sequence: Synthetic polypeptide
  REGION 1..480: note = XENP022936 [ICOS]_H0.35_L0.36_Fab-1G6_L1.194_H1.279 scFv-Fc Heavy Chain

SEQ ID NO: 28509 - protein, 214 aa, synthetic construct; identical to SEQ ID NO: 26517
  REGION 1..214: note = Description of Artificial Sequence: Synthetic polypeptide
  REGION 1..214: note = XENP022936 [ICOS]_H0.35_L0.36_Fab-1G6_L1.194_H1.279 Light Chain

SEQ ID NO: 28510 - protein, 454 aa, synthetic construct; identical to SEQ ID NO: 28411
  REGION 1..454: note = Description of Artificial Sequence: Synthetic polypeptide
  REGION 1..454: note = XENP022937 [ICOS]_H0.61_L0.36_Fab-1G6_L1.194_H1.279 Fab-Fc Heavy Chain

SEQ ID NO: 28511 - protein, 480 aa, synthetic construct; identical to SEQ ID NO: 2930
  REGION 1..480: note = Description of Artificial Sequence: Synthetic polypeptide
  REGION 1..480: note = XENP022937 [ICOS]_H0.61_L0.36_Fab-1G6_L1.194_H1.279 scFv-Fc Heavy Chain

SEQ ID NO: 28512 - protein, 214 aa, synthetic construct; identical to SEQ ID NO: 26517
  REGION 1..214: note = Description of Artificial Sequence: Synthetic polypeptide
  REGION 1..214: note = XENP022937 [ICOS]_H0.61_L0.36_Fab-1G6_L1.194_H1.279 Light Chain

SEQ ID NO: 28513 - protein, 454 aa, synthetic construct; identical to SEQ ID NO: 26362
  REGION 1..454: note = Description of Artificial Sequence: Synthetic polypeptide
  REGION 1..454: note = XENP022974 [ICOS]_H0_L0.34_Fab-1G6_L1.194_H1.279 Fab-Fc Heavy Chain

SEQ ID NO: 28514 - protein, 480 aa, synthetic construct; identical to SEQ ID NO: 2930
  REGION 1..480: note = Description of Artificial Sequence: Synthetic polypeptide
  REGION 1..480: note = XENP022974 [ICOS]_H0_L0.34_Fab-1G6_L1.194_H1.279 scFv-Fc Heavy Chain

SEQ ID NO: 28515 - protein, 214 aa, synthetic construct; identical to SEQ ID NO: 26497
  REGION 1..214: note = Description of Artificial Sequence: Synthetic polypeptide
  REGION 1..214: note = XENP022974 [ICOS]_H0_L0.34_Fab-1G6_L1.194_H1.279 Light Chain

SEQ ID NO: 28516 - protein, 454 aa, synthetic construct; identical to SEQ ID NO: 28408
  REGION 1..454: note = Description of Artificial Sequence: Synthetic polypeptide
  REGION 1..454: note = XENP022975 [ICOS]_H0.35_L0.34_Fab-1G6_L1.194_H1.279 Fab-Fc Heavy Chain

SEQ ID NO: 28517 - protein, 480 aa, synthetic construct; identical to SEQ ID NO: 2930
  REGION 1..480: note = Description of Artificial Sequence: Synthetic polypeptide
  REGION 1..480: note = XENP022975 [ICOS]_H0.35_L0.34_Fab-1G6_L1.194_H1.279 scFv-Fc Heavy Chain

SEQ ID NO: 28518 - protein, 214 aa, synthetic construct; identical to SEQ ID NO: 26497
  REGION 1..214: note = Description of Artificial Sequence: Synthetic polypeptide
  REGION 1..214: note = XENP022975 [ICOS]_H0.35_L0.34_Fab-1G6_L1.194_H1.279 Light Chain

SEQ ID NO: 28519 - protein, 454 aa, synthetic construct; identical to SEQ ID NO: 28411
  REGION 1..454: note = Description of Artificial Sequence: Synthetic polypeptide
  REGION 1..454: note = XENP022976 [ICOS]_H0.61_L0.34_Fab-1G6_L1.194_H1.279 Fab-Fc Heavy Chain

SEQ ID NO: 28520 - protein, 480 aa, synthetic construct; identical to SEQ ID NO: 2930
  REGION 1..480: note = Description of Artificial Sequence: Synthetic polypeptide
  REGION 1..480: note = XENP022976 [ICOS]_H0.61_L0.34_Fab-1G6_L1.194_H1.279 scFv-Fc Heavy Chain

SEQ ID NO: 28521 - protein, 214 aa, synthetic construct; identical to SEQ ID NO: 26497
  REGION 1..214: note = Description of Artificial Sequence: Synthetic polypeptide
  REGION 1..214: note = XENP022976 [ICOS]_H0.61_L0.34_Fab-1G6_L1.194_H1.279 Light Chain

SEQ ID NO: 28522 - protein, 454 aa, synthetic construct; identical to SEQ ID NO: 26362
  REGION 1..454: note = Description of Artificial Sequence: Synthetic polypeptide
  REGION 1..454: note = XENP022977 [ICOS]_H0_L0.37_Fab-1G6_L1.194_H1.279 Fab-Fc Heavy Chain

SEQ ID NO: 28523 - protein, 480 aa, synthetic construct; identical to SEQ ID NO: 2930
  REGION 1..480: note = Description of Artificial Sequence: Synthetic polypeptide
  REGION 1..480: note = XENP022977 [ICOS]_H0_L0.37_Fab-1G6_L1.194_H1.279 scFv-Fc Heavy Chain

SEQ ID NO: 28524 - protein, 214 aa, synthetic construct; identical to SEQ ID NO: 26537
  REGION 1..214: note = Description of Artificial Sequence: Synthetic polypeptide
  REGION 1..214: note = XENP022977 [ICOS]_H0_L0.37_Fab-1G6_L1.194_H1.279 Light Chain

SEQ ID NO: 28525 - protein, 454 aa, synthetic construct; identical to SEQ ID NO: 28408
  REGION 1..454: note = Description of Artificial Sequence: Synthetic polypeptide
  REGION 1..454: note = XENP022978 [ICOS]_H0.35_L0.37_Fab-1G6_L1.194_H1.279 Fab-Fc Heavy Chain

SEQ ID NO: 28526 - protein, 480 aa, synthetic construct; identical to SEQ ID NO: 2930
  REGION 1..480: note = Description of Artificial Sequence: Synthetic polypeptide
  REGION 1..480: note = XENP022978 [ICOS]_H0.35_L0.37_Fab-1G6_L1.194_H1.279 scFv-Fc Heavy Chain

SEQ ID NO: 28527 - protein, 214 aa, synthetic construct; identical to SEQ ID NO: 26537
  REGION 1..214: note = Description of Artificial Sequence: Synthetic polypeptide
  REGION 1..214: note = XENP022978 [ICOS]_H0.35_L0.37_Fab-1G6_L1.194_H1.279 Light Chain

SEQ ID NO: 28528 - protein, 454 aa, synthetic construct; identical to SEQ ID NO: 28411
  REGION 1..454: note = Description of Artificial Sequence: Synthetic polypeptide
  REGION 1..454: note = XENP022979 [ICOS]_H0.61_L0.37_Fab-1G6_L1.194_H1.279 Fab-Fc Heavy Chain

SEQ ID NO: 28529 - protein, 480 aa, synthetic construct; identical to SEQ ID NO: 2930
  REGION 1..480: note = Description of Artificial Sequence: Synthetic polypeptide
  REGION 1..480: note = XENP022979 [ICOS]_H0.61_L0.37_Fab-1G6_L1.194_H1.279 scFv-Fc Heavy Chain

SEQ ID NO: 28530 - protein, 214 aa, synthetic construct; identical to SEQ ID NO: 26537
  REGION 1..214: note = Description of Artificial Sequence: Synthetic polypeptide
  REGION 1..214: note = XENP022979 [ICOS]_H0.61_L0.37_Fab-1G6_L1.194_H1.279 Light Chain

SEQ ID NO: 28531 - protein, 454 aa, synthetic construct; identical to SEQ ID NO: 26362
  REGION 1..454: note = Description of Artificial Sequence: Synthetic polypeptide
  REGION 1..454: note = XENP022995 [ICOS]_H0_L0.35_Fab-1G6_L1.194_H1.279 Fab-Fc Heavy Chain

SEQ ID NO: 28532 - protein, 480 aa, synthetic construct; identical to SEQ ID NO: 2930
  REGION 1..480: note = Description of Artificial Sequence: Synthetic polypeptide
  REGION 1..480: note = XENP022995 [ICOS]_H0_L0.35_Fab-1G6_L1.194_H1.279 scFv-Fc Heavy Chain

SEQ ID NO: 28533 - protein, 214 aa, synthetic construct; identical to SEQ ID NO: 28008
  REGION 1..214: note = Description of Artificial Sequence: Synthetic polypeptide
  REGION 1..214: note = XENP022995 [ICOS]_H0_L0.35_Fab-1G6_L1.194_H1.279 Light Chain

SEQ ID NO: 28534 - protein, 454 aa, synthetic construct; identical to SEQ ID NO: 28408
  REGION 1..454: note = Description of Artificial Sequence: Synthetic polypeptide
  REGION 1..454: note = XENP022996 [ICOS]_H0.35_L0.35_Fab-1G6_L1.194_H1.279 Fab-Fc Heavy Chain

SEQ ID NO: 28535 - protein, 480 aa, synthetic construct; identical to SEQ ID NO: 2930
  REGION 1..480: note = Description of Artificial Sequence: Synthetic polypeptide
  REGION 1..480: note = XENP022996 [ICOS]_H0.35_L0.35_Fab-1G6_L1.194_H1.279 scFv-Fc Heavy Chain

SEQ ID NO: 28536 - protein, 214 aa, synthetic construct; identical to SEQ ID NO: 28008
  REGION 1..214: note = Description of Artificial Sequence: Synthetic polypeptide
  REGION 1..214: note = XENP022996 [ICOS]_H0.35_L0.35_Fab-1G6_L1.194_H1.279 Light Chain

SEQ ID NO: 28537 - protein, 454 aa, synthetic construct; identical to SEQ ID NO: 28411
  REGION 1..454: note = Description of Artificial Sequence: Synthetic polypeptide
  REGION 1..454: note = XENP023001 [ICOS]_H0.61_L0.35_Fab-1G6_L1.194_H1.279 Fab-Fc Heavy Chain

SEQ ID NO: 28538 - protein, 480 aa, synthetic construct; identical to SEQ ID NO: 2930
  REGION 1..480: note = Description of Artificial Sequence: Synthetic polypeptide
  REGION 1..480: note = XENP023001 [ICOS]_H0.61_L0.35_Fab-1G6_L1.194_H1.279 scFv-Fc Heavy Chain

SEQ ID NO: 28539 - protein, 214 aa, synthetic construct; identical to SEQ ID NO: 28008
  REGION 1..214: note = Description of Artificial Sequence: Synthetic polypeptide
  REGION 1..214: note = XENP023001 [ICOS]_H0.61_L0.35_Fab-1G6_L1.194_H1.279 Light Chain

SEQ ID NO: 28540 - protein, 454 aa, synthetic construct
  REGION 1..454: note = Description of Artificial Sequence: Synthetic polypeptide
  REGION 1..454: note = XENP023103 [ICOS]_H0.37_L0_Fab-1G6_L1.194_H1.279 Fab-Fc Heavy Chain
QVQLVQSGAEVKKPGASVKVSCKASGYTFTGYYMHWVRQAPGQGLEWMGWINPHSGGTNYAQKFQGRVTMTRDTSISTAYMELSSLRSEDTAVYYCARTYYYDTSGYYHDAFDVWGQGTMVTVSSASTKGPSVFPLAPSSKSTSGGTAALGCLVKDYFPEPVTVSWNSGALTSGVHTFPAVLQSSGLYSLSSVVTVPSSSLGTQTYICNVNHKPSDTKVDKKVEPKSCDKTHTCPPCPAPPVAGPSVFLFPPKPKDTLMISRTPEVTCVVVDVKHEDPEVKFNWYVDGVEVHNAKTKPREEEYNSTYRVVSVLTVLHQDWLNGKEYKCKVSNKALPAPIEKTISKAKGQPREPQVYTLPPSREEMTKNQVSLTCDVSGFYPSDIAVEWESDGQPENNYKTTPPVLDSDGSFFLYSKLTVDKSRWEQGDVFSCSVLHEALHSHYTQKSLSLSPGK

SEQ ID NO: 28541 - protein, 480 aa, synthetic construct; identical to SEQ ID NO: 2930
  REGION 1..480: note = Description of Artificial Sequence: Synthetic polypeptide
  REGION 1..480: note = XENP023103 [ICOS]_H0.37_L0_Fab-1G6_L1.194_H1.279 scFv-Fc Heavy Chain

SEQ ID NO: 28542 - protein, 214 aa, synthetic construct; identical to SEQ ID NO: 26297
  REGION 1..214: note = Description of Artificial Sequence: Synthetic polypeptide
  REGION 1..214: note = XENP023103 [ICOS]_H0.37_L0_Fab-1G6_L1.194_H1.279 Light Chain

SEQ ID NO: 28543 - protein, 454 aa, synthetic construct; identical to SEQ ID NO: 26642
  REGION 1..454: note = Description of Artificial Sequence: Synthetic polypeptide
  REGION 1..454: note = XENP023104 [ICOS]_H0.66_L0_Fab-1G6_L1.194_H1.279 Fab-Fc Heavy Chain

SEQ ID NO: 28544 - protein, 480 aa, synthetic construct; identical to SEQ ID NO: 2930
  REGION 1..480: note = Description of Artificial Sequence: Synthetic polypeptide
  REGION 1..480: note = XENP023104 [ICOS]_H0.66_L0_Fab-1G6_L1.194_H1.279 scFv-Fc Heavy Chain

SEQ ID NO: 28545 - protein, 214 aa, synthetic construct; identical to SEQ ID NO: 26297
  REGION 1..214: note = Description of Artificial Sequence: Synthetic polypeptide
  REGION 1..214: note = XENP023104 [ICOS]_H0.66_L0_Fab-1G6_L1.194_H1.279 Light Chain

SEQ ID NO: 28546 - protein, 454 aa, synthetic construct; identical to SEQ ID NO: 26642
  REGION 1..454: note = Description of Artificial Sequence: Synthetic polypeptide
  REGION 1..454: note = XENP023411 [ICOS]_H0.66_L0.34_Fab-1G6_L1.194_H1.279 Fab-Fc Heavy Chain

SEQ ID NO: 28547 - protein, 480 aa, synthetic construct; identical to SEQ ID NO: 2930
  REGION 1..480: note = Description of Artificial Sequence: Synthetic polypeptide
  REGION 1..480: note = XENP023411 [ICOS]_H0.66_L0.34_Fab-1G6_L1.194_H1.279 scFv-Fc Heavy Chain

SEQ ID NO: 28548 - protein, 214 aa, synthetic construct; identical to SEQ ID NO: 26497
  REGION 1..214: note = Description of Artificial Sequence: Synthetic polypeptide
  REGION 1..214: note = XENP023411 [ICOS]_H0.66_L0.34_Fab-1G6_L1.194_H1.279 Light Chain

SEQ ID NO: 28549 - protein, 449 aa, synthetic construct
  REGION 1..449: note = Description of Artificial Sequence: Synthetic polypeptide
  REGION 1..449: note = XENP015074 Numax FcKO mAb Heavy Chain
QVTLRESGPALVKPTQTLTLTCTFSGFSLSTAGMSVGWIRQPPGKALEWLADIWWDDKKHYNPSLKDRLTISKDTSKNQVVLKVTNMDPADTATYYCARDMIFNFYFDVWGQGTTVTVSSASTKGPSVFPLAPSSKSTSGGTAALGCLVKDYFPEPVTVSWNSGALTSGVHTFPAVLQSSGLYSLSSVVTVPSSSLGTQTYICNVNHKPSNTKVDKKVEPKSCDKTHTCPPCPAPPVAGPSVFLFPPKPKDTLMISRTPEVTCVVVDVKHEDPEVKFNWYVDGVEVHNAKTKPREEQYNSTYRVVSVLTVLHQDWLNGKEYKCKVSNKALPAPIEKTISKAKGQPREPQVYTLPPSREEMTKNQVSLTCLVKGFYPSDIAVEWESNGQPENNYKTTPPVLDSDGSFFLYSKLTVDKSRWQQGNVFSCSVMHEALHNHYTQKSLSLSPGK

SEQ ID NO: 28550 - protein, 213 aa, synthetic construct
  REGION 1..213: note = Description of Artificial Sequence: Synthetic polypeptide
  REGION 1..213: note = XENP015074 Numax FcKO mAb Light Chain
DIQMTQSPSTLSASVGDRVTITCSASSRVGYMHWYQQKPGKAPKLLIYDTSKLASGVPSRFSGSGSGTEFTLTISSLQPDDFATYYCFQGSGYPFTFGGGTKVEIKRTVAAPSVFIFPPSDEQLKSGTASVVCLLNNFYPREAKVQWKVDNALQSGNSQESVTEQDSKDSTYSLSSTLTLSKADYEKHKVYACEVTHQGLSSPVTKSFNRGEC

SEQ ID NO: 28551 - protein, 442 aa, synthetic construct; identical to SEQ ID NO: 16161
  REGION 1..442: note = Description of Artificial Sequence: Synthetic polypeptide
  REGION 1..442: note = XENP016432 nivolumab_H0L0 FcKO mAb Heavy Chain

SEQ ID NO: 28552 - protein, 214 aa, synthetic construct; identical to SEQ ID NO: 16146
  REGION 1..214: note = Description of Artificial Sequence: Synthetic polypeptide
  REGION 1..214: note = XENP016432 nivolumab_H0L0 FcKO mAb Light Chain

SEQ ID NO: 28553 - protein, 454 aa, synthetic construct; identical to SEQ ID NO: 26292
  REGION 1..454: note = Description of Artificial Sequence: Synthetic polypeptide
  REGION 1..454: note = XENP016435 [ICOS]_H0L0 FcKO mAb Heavy Chain

SEQ ID NO: 28554 - protein, 214 aa, synthetic construct; identical to SEQ ID NO: 26297
  REGION 1..214: note = Description of Artificial Sequence: Synthetic polypeptide
  REGION 1..214: note = XENP016435 [ICOS]_H0L0 FcKO mAb Light Chain

SEQ ID NO: 28555 - protein, 231 aa, synthetic construct; identical to SEQ ID NO: 2393
  REGION 1..231: note = Description of Artificial Sequence: Synthetic polypeptide
  REGION 1..231: note = XENP020111 1G6_L1.194_H1.279 one-arm mAb Fc-only Heavy Chain

SEQ ID NO: 28556 - protein, 480 aa, synthetic construct; identical to SEQ ID NO: 2870
  REGION 1..480: note = Description of Artificial Sequence: Synthetic polypeptide
  REGION 1..480: note = XENP020111 1G6_L1.194_H1.279 one-arm mAb scFv-Fc Heavy Chain

SEQ ID NO: 28557 - protein, 252 aa, synthetic construct
  REGION 1..252: note = Description of Artificial Sequence: Synthetic polypeptide
  REGION 1..252: note = XENPA1 (XENP022050 [ICOS]_H0L0 scFv)
QVQLVQSGAEVKKPGASVKVSCKASGYTFTGYYMHWVRQAPGQGLEWMGWINPHSGGTNYAQKFQGRVTMTRDTSISTAYMELSRLRSDDTAVYYCARTYYYDSSGYYHDAFDIWGQGTMVTVSSGKPGSGKPGSGKPGSGKPGSDIQMTQSPSSVSASVGDRVTITCRASQGISRLLAWYQQKPGKAPKLLIYVASSLQSGVPSRFSGSGSGTDFTLTISSLQPEDFATYYCQQANSFPWTFGQGTKVEIK

SEQ ID NO: 28558 - protein, 252 aa, synthetic construct
  REGION 1..252: note = Description of Artificial Sequence: Synthetic polypeptide
  REGION 1..252: note = XENPA2 (XENP022051 [ICOS]_H0.1_L0 scFv)
QVQLVQSGAEVKKPGASVKVSCKASGYTFTEYYMHWVRQAPGQGLEWMGWINPHSGGTNYAQKFQGRVTMTRDTSISTAYMELSRLRSDDTAVYYCARTYYYDSSGYYHDAFDIWGQGTMVTVSSGKPGSGKPGSGKPGSGKPGSDIQMTQSPSSVSASVGDRVTITCRASQGISRLLAWYQQKPGKAPKLLIYVASSLQSGVPSRFSGSGSGTDFTLTISSLQPEDFATYYCQQANSFPWTFGQGTKVEIK

SEQ ID NO: 28559 - protein, 252 aa, synthetic construct
  REGION 1..252: note = Description of Artificial Sequence: Synthetic polypeptide
  REGION 1..252: note = XENPA3 (XENP022052 [ICOS]_H0.2_L0 scFv)
QVQLVQSGAEVKKPGASVKVSCKASGYTFTSYYMHWVRQAPGQGLEWMGWINPHSGGTNYAQKFQGRVTMTRDTSISTAYMELSRLRSDDTAVYYCARTYYYDSSGYYHDAFDIWGQGTMVTVSSGKPGSGKPGSGKPGSGKPGSDIQMTQSPSSVSASVGDRVTITCRASQGISRLLAWYQQKPGKAPKLLIYVASSLQSGVPSRFSGSGSGTDFTLTISSLQPEDFATYYCQQANSFPWTFGQGTKVEIK

SEQ ID NO: 28560 - protein, 252 aa, synthetic construct
  REGION 1..252: note = Description of Artificial Sequence: Synthetic polypeptide
  REGION 1..252: note = XENPA4 (XENP022053 [ICOS]_H0.3_L0 scFv)
QVQLVQSGAEVKKPGASVKVSCKASGYTFTGYYMHWVRQAPGQGLEWMGIINPHSGGTNYAQKFQGRVTMTRDTSISTAYMELSRLRSDDTAVYYCARTYYYDSSGYYHDAFDIWGQGTMVTVSSGKPGSGKPGSGKPGSGKPGSDIQMTQSPSSVSASVGDRVTITCRASQGISRLLAWYQQKPGKAPKLLIYVASSLQSGVPSRFSGSGSGTDFTLTISSLQPEDFATYYCQQANSFPWTFGQGTKVEIK

SEQ ID NO: 28561 - protein, 252 aa, synthetic construct
  REGION 1..252: note = Description of Artificial Sequence: Synthetic polypeptide
  REGION 1..252: note = XENPA5 (XENP022054 [ICOS]_H0.4_L0 scFv)
QVQLVQSGAEVKKPGASVKVSCKASGYTFTGYYMHWVRQAPGQGLEWMGWINPESGGTNYAQKFQGRVTMTRDTSISTAYMELSRLRSDDTAVYYCARTYYYDSSGYYHDAFDIWGQGTMVTVSSGKPGSGKPGSGKPGSGKPGSDIQMTQSPSSVSASVGDRVTITCRASQGISRLLAWYQQKPGKAPKLLIYVASSLQSGVPSRFSGSGSGTDFTLTISSLQPEDFATYYCQQANSFPWTFGQGTKVEIK

SEQ ID NO: 28562 - protein, 252 aa, synthetic construct
  REGION 1..252: note = Description of Artificial Sequence: Synthetic polypeptide
  REGION 1..252: note = XENPA6 (XENP022055 [ICOS]_H0.5_L0 scFv)
QVQLVQSGAEVKKPGASVKVSCKASGYTFTGYYMHWVRQAPGQGLEWMGWINPSSGGTNYAQKFQGRVTMTRDTSISTAYMELSRLRSDDTAVYYCARTYYYDSSGYYHDAFDIWGQGTMVTVSSGKPGSGKPGSGKPGSGKPGSDIQMTQSPSSVSASVGDRVTITCRASQGISRLLAWYQQKPGKAPKLLIYVASSLQSGVPSRFSGSGSGTDFTLTISSLQPEDFATYYCQQANSFPWTFGQGTKVEIK

SEQ ID NO: 28563 - protein, 252 aa, synthetic construct
  REGION 1..252: note = Description of Artificial Sequence: Synthetic polypeptide
  REGION 1..252: note = XENPA7 (XENP022056 [ICOS]_H0.6_L0 scFv)
QVQLVQSGAEVKKPGASVKVSCKASGYTFTGYYMHWVRQAPGQGLEWMGWINPHGGGTNYAQKFQGRVTMTRDTSISTAYMELSRLRSDDTAVYYCARTYYYDSSGYYHDAFDIWGQGTMVTVSSGKPGSGKPGSGKPGSGKPGSDIQMTQSPSSVSASVGDRVTITCRASQGISRLLAWYQQKPGKAPKLLIYVASSLQSGVPSRFSGSGSGTDFTLTISSLQPEDFATYYCQQANSFPWTFGQGTKVEIK

SEQ ID NO: 28564 - protein, 252 aa, synthetic construct
  REGION 1..252: note = Description of Artificial Sequence: Synthetic polypeptide
  REGION 1..252: note = XENPA8 (XENP022057 [ICOS]_H0.7_L0 scFv)
QVQLVQSGAEVKKPGASVKVSCKASGYTFTGYYMHWVRQAPGQGLEWMGWINPHSGETNYAQKFQGRVTMTRDTSISTAYMELSRLRSDDTAVYYCARTYYYDSSGYYHDAFDIWGQGTMVTVSSGKPGSGKPGSGKPGSGKPGSDIQMTQSPSSVSASVGDRVTITCRASQGISRLLAWYQQKPGKAPKLLIYVASSLQSGVPSRFSGSGSGTDFTLTISSLQPEDFATYYCQQANSFPWTFGQGTKVEIK

SEQ ID NO: 28565 - protein, 252 aa, synthetic construct
  REGION 1..252: note = Description of Artificial Sequence: Synthetic polypeptide
  REGION 1..252: note = XENPA9 (XENP022058 [ICOS]_H0.8_L0 scFv)
QVQLVQSGAEVKKPGASVKVSCKASGYTFTGYYMHWVRQAPGQGLEWMGWINPHSGGTSYAQKFQGRVTMTRDTSISTAYMELSRLRSDDTAVYYCARTYYYDSSGYYHDAFDIWGQGTMVTVSSGKPGSGKPGSGKPGSGKPGSDIQMTQSPSSVSASVGDRVTITCRASQGISRLLAWYQQKPGKAPKLLIYVASSLQSGVPSRFSGSGSGTDFTLTISSLQPEDFATYYCQQANSFPWTFGQGTKVEIK

SEQ ID NO: 28566 - protein, 251 aa, synthetic construct
  REGION 1..251: note = Description of Artificial Sequence: Synthetic polypeptide
  REGION 1..251: note = XENPA10 (XENP022059 [ICOS]_H0.9_L0 scFv)
QVQLVQSGAEVKKPGASVKVSCKASGYTFTGYYMHWVRQAPGQGLEWMGWINPHSGGTNYAEKFQGRVTMTRDTSISTAYMELSRLRSDDTAVYYCARTYYYDSSGYYHDAFDIWGQGTMVTVSSGKPGSGKPGSGKPGSGKPGSIQMTQSPSSVSASVGDRVTITCRASQGISRLLAWYQQKPGKAPKLLIYVASSLQSGVPSRFSGSGSGTDFTLTISSLQPEDFATYYCQQANSFPWTFGQGTKVEIK

SEQ ID NO: 28567 - protein, 252 aa, synthetic construct
  REGION 1..252: note = Description of Artificial Sequence: Synthetic polypeptide
  REGION 1..252: note = XENPA11 (XENP022060 [ICOS]_H0.10_L0 scFv)
QVQLVQSGAEVKKPGASVKVSCKASGYTFTGYYMHWVRQAPGQGLEWMGWINPHSGGTNYAQKFQERVTMTRDTSISTAYMELSRLRSDDTAVYYCARTYYYDSSGYYHDAFDIWGQGTMVTVSSGKPGSGKPGSGKPGSGKPGSDIQMTQSPSSVSASVGDRVTITCRASQGISRLLAWYQQKPGKAPKLLIYVASSLQSGVPSRFSGSGSGTDFTLTISSLQPEDFATYYCQQANSFPWTFGQGTKVEIK

SEQ ID NO: 28568 - protein, 252 aa, synthetic construct
  REGION 1..252: note = Description of Artificial Sequence: Synthetic polypeptide
  REGION 1..252: note = XENPA12 (XENP022061 [ICOS]_H0.11_L0 scFv)
QVQLVQSGAEVKKPGASVKVSCKASGYTFTGYYMHWVRQAPGQGLEWMGWINPHSGGTNYAQKFQGRVTITRDTSISTAYMELSRLRSDDTAVYYCARTYYYDSSGYYHDAFDIWGQGTMVTVSSGKPGSGKPGSGKPGSGKPGSDIQMTQSPSSVSASVGDRVTITCRASQGISRLLAWYQQKPGKAPKLLIYVASSLQSGVPSRFSGSGSGTDFTLTISSLQPEDFATYYCQQANSFPWTFGQGTKVEIK

SEQ ID NO: 28569 - protein, 252 aa, synthetic construct
  REGION 1..252: note = Description of Artificial Sequence: Synthetic polypeptide
  REGION 1..252: note = XENPA13 (XENP022062 [ICOS]_H0.12_L0 scFv)
QVQLVQSGAEVKKPGASVKVSCKASGYTFTGYYMHWVRQAPGQGLEWMGWINPHSGGTNYAQKFQGRVTMTADTSISTAYMELSRLRSDDTAVYYCARTYYYDSSGYYHDAFDIWGQGTMVTVSSGKPGSGKPGSGKPGSGKPGSDIQMTQSPSSVSASVGDRVTITCRASQGISRLLAWYQQKPGKAPKLLIYVASSLQSGVPSRFSGSGSGTDFTLTISSLQPEDFATYYCQQANSFPWTFGQGTKVEIK

SEQ ID NO: 28570 - protein, 252 aa, synthetic construct
  REGION 1..252: note = Description of Artificial Sequence: Synthetic polypeptide
  REGION 1..252: note = XENPA14 (XENP022063 [ICOS]_H0.13_L0 scFv)
QVQLVQSGAEVKKPGASVKVSCKASGYTFTGYYMHWVRQAPGQGLEWMGWINPHSGGTNYAQKFQGRVTMTEDTSISTAYMELSRLRSDDTAVYYCARTYYYDSSGYYHDAFDIWGQGTMVTVSSGKPGSGKPGSGKPGSGKPGSDIQMTQSPSSVSASVGDRVTITCRASQGISRLLAWYQQKPGKAPKLLIYVASSLQSGVPSRFSGSGSGTDFTLTISSLQPEDFATYYCQQANSFPWTFGQGTKVEIK

SEQ ID NO: 28571 - protein, 252 aa, synthetic construct
  REGION 1..252: note = Description of Artificial Sequence: Synthetic polypeptide
  REGION 1..252: note = XENPA15 (XENP022064 [ICOS]_H0.14_L0 scFv)
QVQLVQSGAEVKKPGASVKVSCKASGYTFTGYYMHWVRQAPGQGLEWMGWINPHSGGTNYAQKFQGRVTMTTDTSISTAYMELSRLRSDDTAVYYCARTYYYDSSGYYHDAFDIWGQGTMVTVSSGKPGSGKPGSGKPGSGKPGSDIQMTQSPSSVSASVGDRVTITCRASQGISRLLAWYQQKPGKAPKLLIYVASSLQSGVPSRFSGSGSGTDFTLTISSLQPEDFATYYCQQANSFPWTFGQGTKVEIK

SEQ ID NO: 28572 - protein, 252 aa, synthetic construct
  REGION 1..252: note = Description of Artificial Sequence: Synthetic polypeptide
  REGION 1..252: note = XENPA16 (XENP022065 [ICOS]_H0.15_L0 scFv)
QVQLVQSGAEVKKPGASVKVSCKASGYTFTGYYMHWVRQAPGQGLEWMGWINPHSGGTNYAQKFQGRVTMTRDESISTAYMELSRLRSDDTAVYYCARTYYYDSSGYYHDAFDIWGQGTMVTVSSGKPGSGKPGSGKPGSGKPGSDIQMTQSPSSVSASVGDRVTITCRASQGISRLLAWYQQKPGKAPKLLIYVASSLQSGVPSRFSGSGSGTDFTLTISSLQPEDFATYYCQQANSFPWTFGQGTKVEIK

SEQ ID NO: 28573 - protein, 252 aa, synthetic construct
  REGION 1..252: note = Description of Artificial Sequence: Synthetic polypeptide
  REGION 1..252: note = XENPA17 (XENP022066 [ICOS]_H0.16_L0 scFv)
QVQLVQSGAEVKKPGASVKVSCKASGYTFTGYYMHWVRQAPGQGLEWMGWINPHSGGTNYAQKFQGRVTMTRDTSTSTAYMELSRLRSDDTAVYYCARTYYYDSSGYYHDAFDIWGQGTMVTVSSGKPGSGKPGSGKPGSGKPGSDIQMTQSPSSVSASVGDRVTITCRASQGISRLLAWYQQKPGKAPKLLIYVASSLQSGVPSRFSGSGSGTDFTLTISSLQPEDFATYYCQQANSFPWTFGQGTKVEIK

SEQ ID NO: 28574 - protein, 252 aa, synthetic construct
  REGION 1..252: note = Description of Artificial Sequence: Synthetic polypeptide
  REGION 1..252: note = XENPA18 (XENP022067 [ICOS]_H0.17_L0 scFv)
QVQLVQSGAEVKKPGASVKVSCKASGYTFTGYYMHWVRQAPGQGLEWMGWINPHSGGTNYAQKFQGRVTMTRDTSISTAYMELSSLRSDDTAVYYCARTYYYDSSGYYHDAFDIWGQGTMVTVSSGKPGSGKPGSGKPGSGKPGSDIQMTQSPSSVSASVGDRVTITCRASQGISRLLAWYQQKPGKAPKLLIYVASSLQSGVPSRFSGSGSGTDFTLTISSLQPEDFATYYCQQANSFPWTFGQGTKVEIK

SEQ ID NO: 28575 - protein, 252 aa, synthetic construct
  REGION 1..252: note = Description of Artificial Sequence: Synthetic polypeptide
  REGION 1..252: note = XENPA19 (XENP022068 [ICOS]_H0.18_L0 scFv)
QVQLVQSGAEVKKPGASVKVSCKASGYTFTGYYMHWVRQAPGQGLEWMGWINPHSGGTNYAQKFQGRVTMTRDTSISTAYMELSRLRSEDTAVYYCARTYYYDSSGYYHDAFDIWGQGTMVTVSSGKPGSGKPGSGKPGSGKPGSDIQMTQSPSSVSASVGDRVTITCRASQGISRLLAWYQQKPGKAPKLLIYVASSLQSGVPSRFSGSGSGTDFTLTISSLQPEDFATYYCQQANSFPWTFGQGTKVEIK

SEQ ID NO: 28576 - protein, 252 aa, synthetic construct
  REGION 1..252: note = Description of Artificial Sequence: Synthetic polypeptide
  REGION 1..252: note = XENPA20 (XENP022069 [ICOS]_H0.19_L0 scFv)
QVQLVQSGAEVKKPGASVKVSCKASGYTFTGYYMHWVRQAPGQGLEWMGWINPHSGGTNYAQKFQGRVTMTRDTSISTAYMELSRLRSDDTAVYYCARTYYYASSGYYHDAFDIWGQGTMVTVSSGKPGSGKPGSGKPGSGKPGSDIQMTQSPSSVSASVGDRVTITCRASQGISRLLAWYQQKPGKAPKLLIYVASSLQSGVPSRFSGSGSGTDFTLTISSLQPEDFATYYCQQANSFPWTFGQGTKVEIK

SEQ ID NO: 28577 - protein, 252 aa, synthetic construct
  REGION 1..252: note = Description of Artificial Sequence: Synthetic polypeptide
  REGION 1..252: note = XENPA21 (XENP022070 [ICOS]_H0.20_L0 scFv)
QVQLVQSGAEVKKPGASVKVSCKASGYTFTGYYMHWVRQAPGQGLEWMGWINPHSGGTNYAQKFQGRVTMTRDTSISTAYMELSRLRSDDTAVYYCARTYYYESSGYYHDAFDIWGQGTMVTVSSGKPGSGKPGSGKPGSGKPGSDIQMTQSPSSVSASVGDRVTITCRASQGISRLLAWYQQKPGKAPKLLIYVASSLQSGVPSRFSGSGSGTDFTLTISSLQPEDFATYYCQQANSFPWTFGQGTKVEIK

SEQ ID NO: 28578 - protein, 252 aa, synthetic construct
  REGION 1..252: note = Description of Artificial Sequence: Synthetic polypeptide
  REGION 1..252: note = XENPA22 (XENP022071 [ICOS]_H0.21_L0 scFv)
QVQLVQSGAEVKKPGASVKVSCKASGYTFTGYYMHWVRQAPGQGLEWMGWINPHSGGTNYAQKFQGRVTMTRDTSISTAYMELSRLRSDDTAVYYCARTYYYQSSGYYHDAFDIWGQGTMVTVSSGKPGSGKPGSGKPGSGKPGSDIQMTQSPSSVSASVGDRVTITCRASQGISRLLAWYQQKPGKAPKLLIYVASSLQSGVPSRFSGSGSGTDFTLTISSLQPEDFATYYCQQANSFPWTFGQGTKVEIK

SEQ ID NO: 28579 - protein, 252 aa, synthetic construct
  REGION 1..252: note = Description of Artificial Sequence: Synthetic polypeptide
  REGION 1..252: note = XENPA23 (XENP022072 [ICOS]_H0.22_L0 scFv)
QVQLVQSGAEVKKPGASVKVSCKASGYTFTGYYMHWVRQAPGQGLEWMGWINPHSGGTNYAQKFQGRVTMTRDTSISTAYMELSRLRSDDTAVYYCARTYYYSSSGYYHDAFDIWGQGTMVTVSSGKPGSGKPGSGKPGSGKPGSDIQMTQSPSSVSASVGDRVTITCRASQGISRLLAWYQQKPGKAPKLLIYVASSLQSGVPSRFSGSGSGTDFTLTISSLQPEDFATYYCQQANSFPWTFGQGTKVEIK

SEQ ID NO: 28580 - protein, 252 aa, synthetic construct
  REGION 1..252: note = Description of Artificial Sequence: Synthetic polypeptide
  REGION 1..252: note = XENPA24 (XENP022073 [ICOS]_H0.23_L0 scFv)
QVQLVQSGAEVKKPGASVKVSCKASGYTFTGYYMHWVRQAPGQGLEWMGWINPHSGGTNYAQKFQGRVTMTRDTSISTAYMELSRLRSDDTAVYYCARTYYYTSSGYYHDAFDIWGQGTMVTVSSGKPGSGKPGSGKPGSGKPGSDIQMTQSPSSVSASVGDRVTITCRASQGISRLLAWYQQKPGKAPKLLIYVASSLQSGVPSRFSGSGSGTDFTLTISSLQPEDFATYYCQQANSFPWTFGQGTKVEIK

SEQ ID NO: 28581 - protein, 252 aa, synthetic construct
  REGION 1..252: note = Description of Artificial Sequence: Synthetic polypeptide
  REGION 1..252: note = XENPA25 (XENP022074 [ICOS]_H0.24_L0 scFv)
QVQLVQSGAEVKKPGASVKVSCKASGYTFTGYYMHWVRQAPGQGLEWMGWINPHSGGTNYAQKFQGRVTMTRDTSISTAYMELSRLRSDDTAVYYCARTYYYDTSGYYHDAFDIWGQGTMVTVSSGKPGSGKPGSGKPGSGKPGSDIQMTQSPSSVSASVGDRVTITCRASQGISRLLAWYQQKPGKAPKLLIYVASSLQSGVPSRFSGSGSGTDFTLTISSLQPEDFATYYCQQANSFPWTFGQGTKVEIK

SEQ ID NO: 28582 - protein, 252 aa, synthetic construct
  REGION 1..252: note = Description of Artificial Sequence: Synthetic polypeptide
  REGION 1..252: note = XENPA26 (XENP022075 [ICOS]_H0.25_L0 scFv)
QVQLVQSGAEVKKPGASVKVSCKASGYTFTGYYMHWVRQAPGQGLEWMGWINPHSGGTNYAQKFQGRVTMTRDTSISTAYMELSRLRSDDTAVYYCARTYYYDSSGYYEDAFDIWGQGTMVTVSSGKPGSGKPGSGKPGSGKPGSDIQMTQSPSSVSASVGDRVTITCRASQGISRLLAWYQQKPGKAPKLLIYVASSLQSGVPSRFSGSGSGTDFTLTISSLQPEDFATYYCQQANSFPWTFGQGTKVEIK

SEQ ID NO: 28583 - protein, 252 aa, synthetic construct
  REGION 1..252: note = Description of Artificial Sequence: Synthetic polypeptide
  REGION 1..252: note = XENPA27 (XENP022076 [ICOS]_H0.26_L0 scFv)
QVQLVQSGAEVKKPGASVKVSCKASGYTFTGYYMHWVRQAPGQGLEWMGWINPHSGGTNYAQKFQGRVTMTRDTSISTAYMELSRLRSDDTAVYYCARTYYYDSSGYYQDAFDIWGQGTMVTVSSGKPGSGKPGSGKPGSGKPGSDIQMTQSPSSVSASVGDRVTITCRASQGISRLLAWYQQKPGKAPKLLIYVASSLQSGVPSRFSGSGSGTDFTLTISSLQPEDFATYYCQQANSFPWTFGQGTKVEIK

SEQ ID NO: 28584 - protein, 252 aa, synthetic construct
  REGION 1..252: note = Description of Artificial Sequence: Synthetic polypeptide
  REGION 1..252: note = XENPA28 (XENP022077 [ICOS]_H0.27_L0 scFv)
QVQLVQSGAEVKKPGASVKVSCKASGYTFTGYYMHWVRQAPGQGLEWMGWINPHSGGTNYAQKFQGRVTMTRDTSISTAYMELSRLRSDDTAVYYCARTYYYDSSGYYSDAFDIWGQGTMVTVSSGKPGSGKPGSGKPGSGKPGSDIQMTQSPSSVSASVGDRVTITCRASQGISRLLAWYQQKPGKAPKLLIYVASSLQSGVPSRFSGSGSGTDFTLTISSLQPEDFATYYCQQANSFPWTFGQGTKVEIK

SEQ ID NO: 28585 - protein, 251 aa, synthetic construct
  REGION 1..251: note = Description of Artificial Sequence: Synthetic polypeptide
  REGION 1..251: note = XENPA29 (XENP022078 [ICOS]_H0.28_L0 scFv)
QVQLVQSAEVKKPGASVKVSCKASGYTFTGYYMHWVRQAPGQGLEWMGWINPHSGGTNYAQKFQGRVTMTRDTSISTAYMELSRLRSDDTAVYYCARTYYYDSSGYYYDAFDIWGQGTMVTVSSGKPGSGKPGSGKPGSGKPGSDIQMTQSPSSVSASVGDRVTITCRASQGISRLLAWYQQKPGKAPKLLIYVASSLQSGVPSRFSGSGSGTDFTLTISSLQPEDFATYYCQQANSFPWTFGQGTKVEIK

SEQ ID NO: 28586 - protein, 252 aa, synthetic construct
  REGION 1..252: note = Description of Artificial Sequence: Synthetic polypeptide
  REGION 1..252: note = XENPA30 (XENP022079 [ICOS]_H0.29_L0 scFv)
QVQLVQSGAEVKKPGASVKVSCKASGYTFTGYYMHWVRQAPGQGLEWMGWINPHSGGTNYAQKFQGRVTMTRDTSISTAYMELSRLRSDDTAVYYCARTYYYDSSGYYHAAFDIWGQGTMVTVSSGKPGSGKPGSGKPGSGKPGSDIQMTQSPSSVSASVGDRVTITCRASQGISRLLAWYQQKPGKAPKLLIYVASSLQSGVPSRFSGSGSGTDFTLTISSLQPEDFATYYCQQANSFPWTFGQGTKVEIK

SEQ ID NO: 28587 - protein, 252 aa, synthetic construct
  REGION 1..252: note = Description of Artificial Sequence: Synthetic polypeptide
  REGION 1..252: note = XENPA31 (XENP022080 [ICOS]_H0.30_L0 scFv)
QVQLVQSGAEVKKPGASVKVSCKASGYTFTGYYMHWVRQAPGQGLEWMGWINPHSGGTNYAQKFQGRVTMTRDTSISTAYMELSRLRSDDTAVYYCARTYYYDSSGYYHEAFDIWGQGTMVTVSSGKPGSGKPGSGKPGSGKPGSDIQMTQSPSSVSASVGDRVTITCRASQGISRLLAWYQQKPGKAPKLLIYVASSLQSGVPSRFSGSGSGTDFTLTISSLQPEDFATYYCQQANSFPWTFGQGTKVEIK

SEQ ID NO: 28588 - protein, 252 aa, synthetic construct
  REGION 1..252: note = Description of Artificial Sequence: Synthetic polypeptide
  REGION 1..252: note = XENPA32 (XENP022081 [ICOS]_H0.31_L0 scFv)
QVQLVQSGAEVKKPGASVKVSCKASGYTFTGYYMHWVRQAPGQGLEWMGWINPHSGGTNYAQKFQGRVTMTRDTSISTAYMELSRLRSDDTAVYYCARTYYYDSSGYYHQAFDIWGQGTMVTVSSGKPGSGKPGSGKPGSGKPGSDIQMTQSPSSVSASVGDRVTITCRASQGISRLLAWYQQKPGKAPKLLIYVASSLQSGVPSRFSGSGSGTDFTLTISSLQPEDFATYYCQQANSFPWTFGQGTKVEIK

SEQ ID NO: 28589 - protein, 252 aa, synthetic construct
  REGION 1..252: note = Description of Artificial Sequence: Synthetic polypeptide
  REGION 1..252: note = XENPA33 (XENP022082 [ICOS]_H0.32_L0 scFv)
QVQLVQSGAEVKKPGASVKVSCKASGYTFTGYYMHWVRQAPGQGLEWMGWINPHSGGTNYAQKFQGRVTMTRDTSISTAYMELSRLRSDDTAVYYCARTYYYDSSGYYHSAFDIWGQGTMVTVSSGKPGSGKPGSGKPGSGKPGSDIQMTQSPSSVSASVGDRVTITCRASQGISRLLAWYQQKPGKAPKLLIYVASSLQSGVPSRFSGSGSGTDFTLTISSLQPEDFATYYCQQANSFPWTFGQGTKVEIK

SEQ ID NO: 28590 - protein, 252 aa, synthetic construct
  REGION 1..252: note = Description of Artificial Sequence: Synthetic polypeptide
  REGION 1..252: note = XENPA34 (XENP022083 [ICOS]_H0.33_L0 scFv)
QVQLVQSGAEVKKPGASVKVSCKASGYTFTGYYMHWVRQAPGQGLEWMGWINPHSGGTNYAQKFQGRVTMTRDTSISTAYMELSRLRSDDTAVYYCARTYYYDSSGYYHTAFDIWGQGTMVTVSSGKPGSGKPGSGKPGSGKPGSDIQMTQSPSSVSASVGDRVTITCRASQGISRLLAWYQQKPGKAPKLLIYVASSLQSGVPSRFSGSGSGTDFTLTISSLQPEDFATYYCQQANSFPWTFGQGTKVEIK

SEQ ID NO: 28591 - protein, 252 aa, synthetic construct
  REGION 1..252: note = Description of Artificial Sequence: Synthetic polypeptide
  REGION 1..252: note = XENPA35 (XENP022084 [ICOS]_H0.34_L0 scFv)
QVQLVQSGAEVKKPGASVKVSCKASGYTFTGYYMHWVRQAPGQGLEWMGWINPHSGGTNYAQKFQGRVTMTRDTSISTAYMELSRLRSDDTAVYYCARTYYYDSSGYYHDAFDVWGQGTMVTVSSGKPGSGKPGSGKPGSGKPGSDIQMTQSPSSVSASVGDRVTITCRASQGISRLLAWYQQKPGKAPKLLIYVASSLQSGVPSRFSGSGSGTDFTLTISSLQPEDFATYYCQQANSFPWTFGQGTKVEIK

SEQ ID NO: 28592 - protein, 252 aa, synthetic construct
  REGION 1..252: note = Description of Artificial Sequence: Synthetic polypeptide
  REGION 1..252: note = XENPA36 (XENP022085 [ICOS]_H0_L0.1 scFv)
QVQLVQSGAEVKKPGASVKVSCKASGYTFTGYYMHWVRQAPGQGLEWMGWINPHSGGTNYAQKFQGRVTMTRDTSISTAYMELSRLRSDDTAVYYCARTYYYDSSGYYHDAFDIWGQGTMVTVSSGKPGSGKPGSGKPGSGKPGSDIQMTQSPSSLSASVGDRVTITCRASQGISRLLAWYQQKPGKAPKLLIYVASSLQSGVPSRFSGSGSGTDFTLTISSLQPEDFATYYCQQANSFPWTFGQGTKVEIK

SEQ ID NO: 28593 - protein, 252 aa, synthetic construct
  REGION 1..252: note = Description of Artificial Sequence: Synthetic polypeptide
  REGION 1..252: note = XENPA37 (XENP022086 [ICOS]_H0_L0.2 scFv)
QVQLVQSGAEVKKPGASVKVSCKASGYTFTGYYMHWVRQAPGQGLEWMGWINPHSGGTNYAQKFQGRVTMTRDTSISTAYMELSRLRSDDTAVYYCARTYYYDSSGYYHDAFDIWGQGTMVTVSSGKPGSGKPGSGKPGSGKPGSDIQMTQSPSSVSASVGDRVTITCQASQGISRLLAWYQQKPGKAPKLLIYVASSLQSGVPSRFSGSGSGTDFTLTISSLQPEDFATYYCQQANSFPWTFGQGTKVEIK

SEQ ID NO: 28594 - protein, 252 aa, synthetic construct
  REGION 1..252: note = Description of Artificial Sequence: Synthetic polypeptide
  REGION 1..252: note = XENPA38 (XENP022087 [ICOS]_H0_L0.3 scFv)
QVQLVQSGAEVKKPGASVKVSCKASGYTFTGYYMHWVRQAPGQGLEWMGWINPHSGGTNYAQKFQGRVTMTRDTSISTAYMELSRLRSDDTAVYYCARTYYYDSSGYYHDAFDIWGQGTMVTVSSGKPGSGKPGSGKPGSGKPGSDIQMTQSPSSVSASVGDRVTITCRASQDISRLLAWYQQKPGKAPKLLIYVASSLQSGVPSRFSGSGSGTDFTLTISSLQPEDFATYYCQQANSFPWTFGQGTKVEIK

SEQ ID NO: 28595 - protein, 252 aa, synthetic construct
  REGION 1..252: note = Description of Artificial Sequence: Synthetic polypeptide
  REGION 1..252: note = XENPA39 (XENP022088 [ICOS]_H0_L0.4 scFv)
QVQLVQSGAEVKKPGASVKVSCKASGYTFTGYYMHWVRQAPGQGLEWMGWINPHSGGTNYAQKFQGRVTMTRDTSISTAYMELSRLRSDDTAVYYCARTYYYDSSGYYHDAFDIWGQGTMVTVSSGKPGSGKPGSGKPGSGKPGSDIQMTQSPSSVSASVGDRVTITCRASQSISRLLAWYQQKPGKAPKLLIYVASSLQSGVPSRFSGSGSGTDFTLTISSLQPEDFATYYCQQANSFPWTFGQGTKVEIK

SEQ ID NO: 28596 - protein, 252 aa, synthetic construct
  REGION 1..252: note = Description of Artificial Sequence: Synthetic polypeptide
  REGION 1..252: note = XENPA40 (XENP022089 [ICOS]_H0_L0.5 scFv)
QVQLVQSGAEVKKPGASVKVSCKASGYTFTGYYMHWVRQAPGQGLEWMGWINPHSGGTNYAQKFQGRVTMTRDTSISTAYMELSRLRSDDTAVYYCARTYYYDSSGYYHDAFDIWGQGTMVTVSSGKPGSGKPGSGKPGSGKPGSDIQMTQSPSSVSASVGDRVTITCRASQGISSLLAWYQQKPGKAPKLLIYVASSLQSGVPSRFSGSGSGTDFTLTISSLQPEDFATYYCQQANSFPWTFGQGTKVEIK

SEQ ID NO: 28597 - protein, 464 aa, synthetic construct
  REGION 1..464: note = Description of Artificial Sequence: Synthetic polypeptide
  REGION 1..464: note = XENPA41 (XENP022090 [ICOS]_H0_L0.6 scFv)
QVQLVQSGAEVKKPGASVKVSCKASGYTFTGYYMHWVRQAPGQGLEWMGWINPHSGGTNYAQKFQGRVTMTRDTSISTAYMELSRLRSDDTAVYYCARTYYYDSSGYYHDAFDIWGQGTMVTVSSASTKGPSVFPLAPSSKSTSGGTAALGCLVKDYFPEPVTVSWNSGALTSGVHTFPAVLQSSGLYSLSSVVTVPSSSLGTQTYICNVNHKPSNTKVDKKVEPKSCGSGKPGSGKPGSGKPGSGKPGSDIQMTQSPSSVSASVGDRVTITCRASQGISSWLAWYQQKPGKAPKLLIYVASSLQSGVPSRFSGSGSGTDFTLTISSLQPEDFATYYCQQANSFPWTFGQGTKVEIKRTVAAPSVFIFPPSDEQLKSGTASVVCLLNNFYPREAKVQWKVDNALQSGNSQESVTEQDSKDSTYSLSSTLTLSKADYEKHKVYACEVTHQGLSSPVTKSFNRGEC

SEQ ID NO: 28598 - protein, 252 aa, synthetic construct
  REGION 1..252: note = Description of Artificial Sequence: Synthetic polypeptide
  REGION 1..252: note = XENPA42 (XENP022091 [ICOS]_H0_L0.7 scFv)
QVQLVQSGAEVKKPGASVKVSCKASGYTFTGYYMHWVRQAPGQGLEWMGWINPHSGGTNYAQKFQGRVTMTRDTSISTAYMELSRLRSDDTAVYYCARTYYYDSSGYYHDAFDIWGQGTMVTVSSGKPGSGKPGSGKPGSGKPGSDIQMTQSPSSVSASVGDRVTITCRASQGISSYLAWYQQKPGKAPKLLIYVASSLQSGVPSRFSGSGSGTDFTLTISSLQPEDFATYYCQQANSFPWTFGQGTKVEIK

SEQ ID NO: 28599 - protein, 252 aa, synthetic construct
  REGION 1..252: note = Description of Artificial Sequence: Synthetic polypeptide
  REGION 1..252: note = XENPA43 (XENP022092 [ICOS]_H0_L0.8 scFv)
QVQLVQSGAEVKKPGASVKVSCKASGYTFTGYYMHWVRQAPGQGLEWMGWINPHSGGTNYAQKFQGRVTMTRDTSISTAYMELSRLRSDDTAVYYCARTYYYDSSGYYHDAFDIWGQGTMVTVSSGKPGSGKPGSGKPGSGKPGSDIQMTQSPSSVSASVGDRVTITCRASQGISRWLAWYQQKPGKAPKLLIYVASSLQSGVPSRFSGSGSGTDFTLTISSLQPEDFATYYCQQANSFPWTFGQGTKVEIK

SEQ ID NO: 28600 - protein, 252 aa, synthetic construct
  REGION 1..252: note = Description of Artificial Sequence: Synthetic polypeptide
  REGION 1..252: note = XENPA44 (XENP022093 [ICOS]_H0_L0.9 scFv)
QVQLVQSGAEVKKPGASVKVSCKASGYTFTGYYMHWVRQAPGQGLEWMGWINPHSGGTNYAQKFQGRVTMTRDTSISTAYMELSRLRSDDTAVYYCARTYYYDSSGYYHDAFDIWGQGTMVTVSSGKPGSGKPGSGKPGSGKPGSDIQMTQSPSSVSASVGDRVTITCRASQGISRYLAWYQQKPGKAPKLLIYVASSLQSGVPSRFSGSGSGTDFTLTISSLQPEDFATYYCQQANSFPWTFGQGTKVEIK

SEQ ID NO: 28601 - protein, 252 aa, synthetic construct
  REGION 1..252: note = Description of Artificial Sequence: Synthetic polypeptide
  REGION 1..252: note = XENPA45 (XENP022094 [ICOS]_H0_L0.10 scFv)
QVQLVQSGAEVKKPGASVKVSCKASGYTFTGYYMHWVRQAPGQGLEWMGWINPHSGGTNYAQKFQGRVTMTRDTSISTAYMELSRLRSDDTAVYYCARTYYYDSSGYYHDAFDIWGQGTMVTVSSGKPGSGKPGSGKPGSGKPGSDIQMTQSPSSVSASVGDRVTITCRASQGISRLLAWYQQKPGKAPKLLIYAASSLQSGVPSRFSGSGSGTDFTLTISSLQPEDFATYYCQQANSFPWTFGQGTKVEIK

SEQ ID NO: 28602 - protein, 252 aa, synthetic construct
  REGION 1..252: note = Description of Artificial Sequence: Synthetic polypeptide
  REGION 1..252: note = XENPA46 (XENP022095 [ICOS]_H0_L0.11 scFv)
QVQLVQSGAEVKKPGASVKVSCKASGYTFTGYYMHWVRQAPGQGLEWMGWINPHSGGTNYAQKFQGRVTMTRDTSISTAYMELSRLRSDDTAVYYCARTYYYDSSGYYHDAFDIWGQGTMVTVSSGKPGSGKPGSGKPGSGKPGSDIQMTQSPSSVSASVGDRVTITCRASQGISRLLAWYQQKPGKAPKLLIYSASSLQSGVPSRFSGSGSGTDFTLTISSLQPEDFATYYCQQANSFPWTFGQGTKVEIK

SEQ ID NO: 28603 - protein, 252 aa, synthetic construct
  REGION 1..252: note = Description of Artificial Sequence: Synthetic polypeptide
  REGION 1..252: note = XENPA47 (XENP022096 [ICOS]_H0_L0.12 scFv)
QVQLVQSGAEVKKPGASVKVSCKASGYTFTGYYMHWVRQAPGQGLEWMGWINPHSGGTNYAQKFQGRVTMTRDTSISTAYMELSRLRSDDTAVYYCARTYYYDSSGYYHDAFDIWGQGTMVTVSSGKPGSGKPGSGKPGSGKPGSDIQMTQSPSSVSASVGDRVTITCRASQGISRLLAWYQQKPGKAPKLLIYVASTLQSGVPSRFSGSGSGTDFTLTISSLQPEDFATYYCQQANSFPWTFGQGTKVEIK

SEQ ID NO: 28604 - protein, 252 aa, synthetic construct
  REGION 1..252: note = Description of Artificial Sequence: Synthetic polypeptide
  REGION 1..252: note = XENPA48 (XENP022101 [ICOS]_H0_L0.13 scFv)
QVQLVQSGAEVKKPGASVKVSCKASGYTFTGYYMHWVRQAPGQGLEWMGWINPHSGGTNYAQKFQGRVTMTRDTSISTAYMELSRLRSDDTAVYYCARTYYYDSSGYYHDAFDIWGQGTMVTVSSGKPGSGKPGSGKPGSGKPGSDIQMTQSPSSVSASVGDRVTITCRASQGISRLLAWYQQKPGKAPKLLIYVASSLESGVPSRFSGSGSGTDFTLTISSLQPEDFATYYCQQANSFPWTFGQGTKVEIK

SEQ ID NO: 28605 - protein, 252 aa, synthetic construct
  REGION 1..252: note = Description of Artificial Sequence: Synthetic polypeptide
  REGION 1..252: note = XENPA49 (XENP022102 [ICOS]_H0_L0.14 scFv)
QVQLVQSGAEVKKPGASVKVSCKASGYTFTGYYMHWVRQAPGQGLEWMGWINPHSGGTNYAQKFQGRVTMTRDTSISTAYMELSRLRSDDTAVYYCARTYYYDSSGYYHDAFDIWGQGTMVTVSSGKPGSGKPGSGKPGSGKPGSDIQMTQSPSSVSASVGDRVTITCRASQGISRLLAWYQQKPGKAPKLLIYVASSLQSGVPSRFSGSGSGTDFTLTISSLQPEDFATYYCQQSNSFPWTFGQGTKVEIK

SEQ ID NO: 28606 - protein, 252 aa, synthetic construct
  REGION 1..252: note = Description of Artificial Sequence: Synthetic polypeptide
  REGION 1..252: note = XENPA50 (XENP022103 [ICOS]_H0_L0.15 scFv)
QVQLVQSGAEVKKPGASVKVSCKASGYTFTGYYMHWVRQAPGQGLEWMGWINPHSGGTNYAQKFQGRVTMTRDTSISTAYMELSRLRSDDTAVYYCARTYYYDSSGYYHDAFDIWGQGTMVTVSSGKPGSGKPGSGKPGSGKPGSDIQMTQSPSSVSASVGDRVTITCRASQGISRLLAWYQQKPGKAPKLLIYVASSLQSGVPSRFSGSGSGTDFTLTISSLQPEDFATYYCQQAESFPWTFGQGTKVEIK

SEQ ID NO: 28607 - protein, 252 aa, synthetic construct
  REGION 1..252: note = Description of Artificial Sequence: Synthetic polypeptide
  REGION 1..252: note = XENPA51 (XENP022104 [ICOS]_H0_L0.16 scFv)
QVQLVQSGAEVKKPGASVKVSCKASGYTFTGYYMHWVRQAPGQGLEWMGWINPHSGGTNYAQKFQGRVTMTRDTSISTAYMELSRLRSDDTAVYYCARTYYYDSSGYYHDAFDIWGQGTMVTVSSGKPGSGKPGSGKPGSGKPGSDIQMTQSPSSVSASVGDRVTITCRASQGISRLLAWYQQKPGKAPKLLIYVASSLQSGVPSRFSGSGSGTDFTLTISSLQPEDFATYYCQQAQSFPWTFGQGTKVEIK

SEQ ID NO: 28608 - protein, 252 aa, synthetic construct
  REGION 1..252: note = Description of Artificial Sequence: Synthetic polypeptide
  REGION 1..252: note = XENPA52 (XENP022105 [ICOS]_H0_L0.17 scFv)
QVQLVQSGAEVKKPGASVKVSCKASGYTFTGYYMHWVRQAPGQGLEWMGWINPHSGGTNYAQKFQGRVTMTRDTSISTAYMELSRLRSDDTAVYYCARTYYYDSSGYYHDAFDIWGQGTMVTVSSGKPGSGKPGSGKPGSGKPGSDIQMTQSPSSVSASVGDRVTITCRASQGISRLLAWYQQKPGKAPKLLIYVASSLQSGVPSRFSGSGSGTDFTLTISSLQPEDFATYYCQQAYSFPWTFGQGTKVEIK

SEQ ID NO: 28609 - protein, 252 aa, synthetic construct
  REGION 1..252: note = Description of Artificial Sequence: Synthetic polypeptide
  REGION 1..252: note = XENPA53 (XENP022106 [ICOS]_H0_L0.18 scFv)
QVQLVQSGAEVKKPGASVKVSCKASGYTFTGYYMHWVRQAPGQGLEWMGWINPHSGGTNYAQKFQGRVTMTRDTSISTAYMELSRLRSDDTAVYYCARTYYYDSSGYYHDAFDIWGQGTMVTVSSGKPGSGKPGSGKPGSGKPGSDIQMTQSPSSVSASVGDRVTITCRASQGISRLLAWYQQKPGKAPKLLIYVASSLQSGVPSRFSGSGSGTDFTLTISSLQPEDFATYYCQQANTFPWTFGQGTKVEIK

SEQ ID NO: 28610 - protein, 252 aa, synthetic construct
  REGION 1..252: note = Description of Artificial Sequence: Synthetic polypeptide
  REGION 1..252: note = XENPA54 (XENP022107 [ICOS]_H0_L0.19 scFv)
QVQLVQSGAEVKKPGASVKVSCKASGYTFTGYYMHWVRQAPGQGLEWMGWINPHSGGTNYAQKFQGRVTMTRDTSISTAYMELSRLRSDDTAVYYCARTYYYDSSGYYHDAFDIWGQGTMVTVSSGKPGSGKPGSGKPGSGKPGSDIQMTQSPSSVSASVGDRVTITCRASQGISRLLAWYQQKPGKAPKLLIYVASSLQSGVPSRFSGSGSGTDFTLTISSLQPEDFATYYCQQANSTPWTFGQGTKVEIK

SEQ ID NO: 28611 - protein, 252 aa, synthetic construct
  REGION 1..252: note = Description of Artificial Sequence: Synthetic polypeptide
  REGION 1..252: note = XENPA55 (XENP022108 [ICOS]_H0_L0.20 scFv)
QVQLVQSGAEVKKPGASVKVSCKASGYTFTGYYMHWVRQAPGQGLEWMGWINPHSGGTNYAQKFQGRVTMTRDTSISTAYMELSRLRSDDTAVYYCARTYYYDSSGYYHDAFDIWGQGTMVTVSSGKPGSGKPGSGKPGSGKPGSDIQMTQSPSSVSASVGDRVTITCRASQGISRLLAWYQQKPGKAPKLLIYVASSLQSGVPSRFSGSGSGTDFTLTISSLQPEDFATYYCQQANSYPWTFGQGTKVEIK

SEQ ID NO: 28612 - protein, 252 aa, synthetic construct
  REGION 1..252: note = Description of Artificial Sequence: Synthetic polypeptide
  REGION 1..252: note = XENPA56 (XENP022767 [ICOS]_H0_L0.21 scFv)
QVQLVQSGAEVKKPGASVKVSCKASGYTFTGYYMHWVRQAPGQGLEWMGWINPHSGGTNYAQKFQGRVTMTRDTSISTAYMELSRLRSDDTAVYYCARTYYYDSSGYYHDAFDIWGQGTMVTVSSGKPGSGKPGSGKPGSGKPGSDIQMTQSPSSVSASVGDRVTITCRASQDISSLLAWYQQKPGKAPKLLIYVASSLQSGVPSRFSGSGSGTDFTLTISSLQPEDFATYYCQQANSFPWTFGQGTKVEIK

SEQ ID NO: 28613 - protein, 252 aa, synthetic construct
  REGION 1..252: note = Description of Artificial Sequence: Synthetic polypeptide
  REGION 1..252: note = XENPA57 (XENP022768 [ICOS]_H0_L0.22 scFv)
QVQLVQSGAEVKKPGASVKVSCKASGYTFTGYYMHWVRQAPGQGLEWMGWINPHSGGTNYAQKFQGRVTMTRDTSISTAYMELSRLRSDDTAVYYCARTYYYDSSGYYHDAFDIWGQGTMVTVSSGKPGSGKPGSGKPGSGKPGSDIQMTQSPSSVSASVGDRVTITCRASQDISRLLAWYQQKPGKAPKLLIYAASSLQSGVPSRFSGSGSGTDFTLTISSLQPEDFATYYCQQANSFPWTFGQGTKVEIK

SEQ ID NO: 28614 - protein, 252 aa, synthetic construct
  REGION 1..252: note = Description of Artificial Sequence: Synthetic polypeptide
  REGION 1..252: note = XENPA58 (XENP022769 [ICOS]_H0_L0.23 scFv)
QVQLVQSGAEVKKPGASVKVSCKASGYTFTGYYMHWVRQAPGQGLEWMGWINPHSGGTNYAQKFQGRVTMTRDTSISTAYMELSRLRSDDTAVYYCARTYYYDSSGYYHDAFDIWGQGTMVTVSSGKPGSGKPGSGKPGSGKPGSDIQMTQSPSSVSASVGDRVTITCRASQDISRLLAWYQQKPGKAPKLLIYVASSLQSGVPSRFSGSGSGTDFTLTISSLQPEDFATYYCQQAESFPWTFGQGTKVEIK

SEQ ID NO: 28615 - protein, 252 aa, synthetic construct
  REGION 1..252: note = Description of Artificial Sequence: Synthetic polypeptide
  REGION 1..252: note = XENPA59 (XENP022770 [ICOS]_H0_L0.24 scFv)
QVQLVQSGAEVKKPGASVKVSCKASGYTFTGYYMHWVRQAPGQGLEWMGWINPHSGGTNYAQKFQGRVTMTRDTSISTAYMELSRLRSDDTAVYYCARTYYYDSSGYYHDAFDIWGQGTMVTVSSGKPGSGKPGSGKPGSGKPGSDIQMTQSPSSVSASVGDRVTITCRASQGISSLLAWYQQKPGKAPKLLIYAASSLQSGVPSRFSGSGSGTDFTLTISSLQPEDFATYYCQQANSFPWTFGQGTKVEIK

SEQ ID NO: 28616 - protein, 252 aa, synthetic construct
  REGION 1..252: note = Description of Artificial Sequence: Synthetic polypeptide
  REGION 1..252: note = XENPA60 (XENP022771 [ICOS]_H0_L0.25 scFv)
QVQLVQSGAEVKKPGASVKVSCKASGYTFTGYYMHWVRQAPGQGLEWMGWINPHSGGTNYAQKFQGRVTMTRDTSISTAYMELSRLRSDDTAVYYCARTYYYDSSGYYHDAFDIWGQGTMVTVSSGKPGSGKPGSGKPGSGKPGSDIQMTQSPSSVSASVGDRVTITCRASQGISSLLAWYQQKPGKAPKLLIYVASSLQSGVPSRFSGSGSGTDFTLTISSLQPEDFATYYCQQAESFPWTFGQGTKVEIK

SEQ ID NO: 28617 - protein, 252 aa, synthetic construct
  REGION 1..252: note = Description of Artificial Sequence: Synthetic polypeptide
  REGION 1..252: note = XENPA61 (XENP022772 [ICOS]_H0_L0.26 scFv)
QVQLVQSGAEVKKPGASVKVSCKASGYTFTGYYMHWVRQAPGQGLEWMGWINPHSGGTNYAQKFQGRVTMTRDTSISTAYMELSRLRSDDTAVYYCARTYYYDSSGYYHDAFDIWGQGTMVTVSSGKPGSGKPGSGKPGSGKPGSDIQMTQSPSSVSASVGDRVTITCRASQGISRLLAWYQQKPGKAPKLLIYAASSLQSGVPSRFSGSGSGTDFTLTISSLQPEDFATYYCQQAESFPWTFGQGTKVEIK

SEQ ID NO: 28618 - protein, 252 aa, synthetic construct
  REGION 1..252: note = Description of Artificial Sequence: Synthetic polypeptide
  REGION 1..252: note = XENPA62 (XENP022773 [ICOS]_H0_L0.27 scFv)
QVQLVQSGAEVKKPGASVKVSCKASGYTFTGYYMHWVRQAPGQGLEWMGWINPHSGGTNYAQKFQGRVTMTRDTSISTAYMELSRLRSDDTAVYYCARTYYYDSSGYYHDAFDIWGQGTMVTVSSGKPGSGKPGSGKPGSGKPGSDIQMTQSPSSVSASVGDRVTITCRASQDISSLLAWYQQKPGKAPKLLIYAASSLQSGVPSRFSGSGSGTDFTLTISSLQPEDFATYYCQQANSFPWTFGQGTKVEIK

SEQ ID NO: 28619 - protein, 252 aa, synthetic construct
  REGION 1..252: note = Description of Artificial Sequence: Synthetic polypeptide
  REGION 1..252: note = XENPA63 (XENP022774 [ICOS]_H0_L0.28 scFv)
QVQLVQSGAEVKKPGASVKVSCKASGYTFTGYYMHWVRQAPGQGLEWMGWINPHSGGTNYAQKFQGRVTMTRDTSISTAYMELSRLRSDDTAVYYCARTYYYDSSGYYHDAFDIWGQGTMVTVSSGKPGSGKPGSGKPGSGKPGSDIQMTQSPSSVSASVGDRVTITCRASQDISSLLAWYQQKPGKAPKLLIYVASSLQSGVPSRFSGSGSGTDFTLTISSLQPEDFATYYCQQAESFPWTFGQGTKVEIK

SEQ ID NO: 28620 - protein, 359 aa, synthetic construct
  REGION 1..359: note = Description of Artificial Sequence: Synthetic polypeptide
  REGION 1..359: note = XENPA64 (XENP022775 [ICOS]_H0_L0.29 scFv)
QVQLVQSGAEVKKPGASVKVSCKASGYTFTGYYMHWVRQAPGQGLEWMGWINPHSGGTNYAQKFQGRVTMTRDTSISTAYMELSRLRSDDTAVYYCARTYYYDSSGYYHDAFDIWGQGTMVTVSSGKPGSGKPGSGKPGSGKPGSDIQMTQSPSSVSASVGDRVTITCRASQDISRLLAWYQQKPGKAPKLLIYAASSLQSGVPSRFSGSGSGTDFTLTISSLQPEDFATYYCQQAESFPWTFGQGTKVEIKRTVAAPSVFIFPPSDEQLKSGTASVVCLLNNFYPREAKVQWKVDNALQSGNSQESVTEQDSKDSTYSLSSTLTLSKADYEKHKVYACEVTHQGLSSPVTKSFNRGEC

SEQ ID NO: 28621 - protein, 252 aa, synthetic construct
  REGION 1..252: note = Description of Artificial Sequence: Synthetic polypeptide
  REGION 1..252: note = XENPA65 (XENP022776 [ICOS]_H0_L0.30 scFv)
QVQLVQSGAEVKKPGASVKVSCKASGYTFTGYYMHWVRQAPGQGLEWMGWINPHSGGTNYAQKFQGRVTMTRDTSISTAYMELSRLRSDDTAVYYCARTYYYDSSGYYHDAFDIWGQGTMVTVSSGKPGSGKPGSGKPGSGKPGSDIQMTQSPSSVSASVGDRVTITCRASQGISSLLAWYQQKPGKAPKLLIYAASSLQSGVPSRFSGSGSGTDFTLTISSLQPEDFATYYCQQAESFPWTFGQGTKVEIK

SEQ ID NO: 28622 - protein, 252 aa, synthetic construct
  REGION 1..252: note = Description of Artificial Sequence: Synthetic polypeptide
  REGION 1..252: note = XENPA66 (XENP022777 [ICOS]_H0_L0.31 scFv)
QVQLVQSGAEVKKPGASVKVSCKASGYTFTGYYMHWVRQAPGQGLEWMGWINPHSGGTNYAQKFQGRVTMTRDTSISTAYMELSRLRSDDTAVYYCARTYYYDSSGYYHDAFDIWGQGTMVTVSSGKPGSGKPGSGKPGSGKPGSDIQMTQSPSSVSASVGDRVTITCRASQDISSLLAWYQQKPGKAPKLLIYAASSLQSGVPSRFSGSGSGTDFTLTISSLQPEDFATYYCQQAESFPWTFGQGTKVEIK

SEQ ID NO: 28623 - protein, 252 aa, synthetic construct
  REGION 1..252: note = Description of Artificial Sequence: Synthetic polypeptide
  REGION 1..252: note = XENPA67 (XENP022778 [ICOS]_H0_L0.32 scFv)
QVQLVQSGAEVKKPGASVKVSCKASGYTFTGYYMHWVRQAPGQGLEWMGWINPHSGGTNYAQKFQGRVTMTRDTSISTAYMELSRLRSDDTAVYYCARTYYYDSSGYYHDAFDIWGQGTMVTVSSGKPGSGKPGSGKPGSGKPGSDIQMTQSPSSVSASVGDRVTITCQASQDISSLLAWYQQKPGKAPKLLIYVASSLQSGVPSRFSGSGSGTDFTLTISSLQPEDFATYYCQQANSFPWTFGQGTKVEIK

SEQ ID NO: 28624 - protein, 252 aa, synthetic construct
  REGION 1..252: note = Description of Artificial Sequence: Synthetic polypeptide
  REGION 1..252: note = XENPA68 (XENP022779 [ICOS]_H0_L0.33 scFv)
QVQLVQSGAEVKKPGASVKVSCKASGYTFTGYYMHWVRQAPGQGLEWMGWINPHSGGTNYAQKFQGRVTMTRDTSISTAYMELSRLRSDDTAVYYCARTYYYDSSGYYHDAFDIWGQGTMVTVSSGKPGSGKPGSGKPGSGKPGSDIQMTQSPSSVSASVGDRVTITCQASQDISRLLAWYQQKPGKAPKLLIYAASSLQSGVPSRFSGSGSGTDFTLTISSLQPEDFATYYCQQANSFPWTFGQGTKVEIK

SEQ ID NO: 28625 - protein, 252 aa, synthetic construct
  REGION 1..252: note = Description of Artificial Sequence: Synthetic polypeptide
  REGION 1..252: note = XENPA69 (XENP022780 [ICOS]_H0_L0.34 scFv)
QVQLVQSGAEVKKPGASVKVSCKASGYTFTGYYMHWVRQAPGQGLEWMGWINPHSGGTNYAQKFQGRVTMTRDTSISTAYMELSRLRSDDTAVYYCARTYYYDSSGYYHDAFDIWGQGTMVTVSSGKPGSGKPGSGKPGSGKPGSDIQMTQSPSSVSASVGDRVTITCQASQDISRLLAWYQQKPGKAPKLLIYVASSLQSGVPSRFSGSGSGTDFTLTISSLQPEDFATYYCQQAESFPWTFGQGTKVEIK

SEQ ID NO: 28626 - protein, 252 aa, synthetic construct
  REGION 1..252: note = Description of Artificial Sequence: Synthetic polypeptide
  REGION 1..252: note = XENPA70 (XENP022781 [ICOS]_H0_L0.35 scFv)
QVQLVQSGAEVKKPGASVKVSCKASGYTFTGYYMHWVRQAPGQGLEWMGWINPHSGGTNYAQKFQGRVTMTRDTSISTAYMELSRLRSDDTAVYYCARTYYYDSSGYYHDAFDIWGQGTMVTVSSGKPGSGKPGSGKPGSGKPGSDIQMTQSPSSVSASVGDRVTITCQASQDISSLLAWYQQKPGKAPKLLIYAASSLQSGVPSRFSGSGSGTDFTLTISSLQPEDFATYYCQQANSFPWTFGQGTKVEIK

SEQ ID NO: 28627 - protein, 252 aa, synthetic construct
  REGION 1..252: note = Description of Artificial Sequence: Synthetic polypeptide
  REGION 1..252: note = XENPA71 (XENP022782 [ICOS]_H0_L0.36 scFv)
QVQLVQSGAEVKKPGASVKVSCKASGYTFTGYYMHWVRQAPGQGLEWMGWINPHSGGTNYAQKFQGRVTMTRDTSISTAYMELSRLRSDDTAVYYCARTYYYDSSGYYHDAFDIWGQGTMVTVSSGKPGSGKPGSGKPGSGKPGSDIQMTQSPSSVSASVGDRVTITCQASQDISSLLAWYQQKPGKAPKLLIYVASSLQSGVPSRFSGSGSGTDFTLTISSLQPEDFATYYCQQAESFPWTFGQGTKVEIK

SEQ ID NO: 28628 - protein, 252 aa, synthetic construct
  REGION 1..252: note = Description of Artificial Sequence: Synthetic polypeptide
  REGION 1..252: note = XENPA72 (XENP022783 [ICOS]_H0_L0.37 scFv)
QVQLVQSGAEVKKPGASVKVSCKASGYTFTGYYMHWVRQAPGQGLEWMGWINPHSGGTNYAQKFQGRVTMTRDTSISTAYMELSRLRSDDTAVYYCARTYYYDSSGYYHDAFDIWGQGTMVTVSSGKPGSGKPGSGKPGSGKPGSDIQMTQSPSSVSASVGDRVTITCQASQDISRLLAWYQQKPGKAPKLLIYAASSLQSGVPSRFSGSGSGTDFTLTISSLQPEDFATYYCQQAESFPWTFGQGTKVEIK

SEQ ID NO: 28629 - protein, 252 aa, synthetic construct
  REGION 1..252: note = Description of Artificial Sequence: Synthetic polypeptide
  REGION 1..252: note = XENPA73 (XENP022784 [ICOS]_H0_L0.38 scFv)
QVQLVQSGAEVKKPGASVKVSCKASGYTFTGYYMHWVRQAPGQGLEWMGWINPHSGGTNYAQKFQGRVTMTRDTSISTAYMELSRLRSDDTAVYYCARTYYYDSSGYYHDAFDIWGQGTMVTVSSGKPGSGKPGSGKPGSGKPGSDIQMTQSPSSVSASVGDRVTITCQASQDISSLLAWYQQKPGKAPKLLIYAASSLQSGVPSRFSGSGSGTDFTLTISSLQPEDFATYYCQQAESFPWTFGQGTKVEIK

SEQ ID NO: 28630 - protein, 252 aa, synthetic construct
  REGION 1..252: note = Description of Artificial Sequence: Synthetic polypeptide
  REGION 1..252: note = XENPA74 (XENP022860 [ICOS]_H0_L0.42 scFv)
QVQLVQSGAEVKKPGASVKVSCKASGYTFTGYYMHWVRQAPGQGLEWMGWINPHSGGTNYAQKFQGRVTMTRDTSISTAYMELSRLRSDDTAVYYCARTYYYDSSGYYHDAFDIWGQGTMVTVSSGKPGSGKPGSGKPGSGKPGSDIQMTQSPSSVSASVGDRVTITCQASQDISSYLAWYQQKPGKAPKLLIYVASSLQSGVPSRFSGSGSGTDFTLTISSLQPEDFATYYCQQAESFPWTFGQGTKVEIK

SEQ ID NO: 28631 - protein, 252 aa, synthetic construct
  REGION 1..252: note = Description of Artificial Sequence: Synthetic polypeptide
  REGION 1..252: note = XENPA75 (XENP022861 [ICOS]_H0_L0.43 scFv)
QVQLVQSGAEVKKPGASVKVSCKASGYTFTGYYMHWVRQAPGQGLEWMGWINPHSGGTNYAQKFQGRVTMTRDTSISTAYMELSRLRSDDTAVYYCARTYYYDSSGYYHDAFDIWGQGTMVTVSSGKPGSGKPGSGKPGSGKPGSDIQMTQSPSSVSASVGDRVTITCQASQDISSYLAWYQQKPGKAPKLLIYAASSLQSGVPSRFSGSGSGTDFTLTISSLQPEDFATYYCQQAESFPWTFGQGTKVEIK

SEQ ID NO: 28632 - protein, 252 aa, synthetic construct
  REGION 1..252: note = Description of Artificial Sequence: Synthetic polypeptide
  REGION 1..252: note = XENPA76 (XENP022862 [ICOS]_H0_L0.44 scFv)
QVQLVQSGAEVKKPGASVKVSCKASGYTFTGYYMHWVRQAPGQGLEWMGWINPHSGGTNYAQKFQGRVTMTRDTSISTAYMELSRLRSDDTAVYYCARTYYYDSSGYYHDAFDIWGQGTMVTVSSGKPGSGKPGSGKPGSGKPGSDIQMTQSPSSVSASVGDRVTITCQASQDISSYLAWYQQKPGKAPKLLIYAASSLQSGVPSRFSGSGSGTDFTLTISSLQPEDFATYYCQQANSFPWTFGQGTKVEIK

SEQ ID NO: 28633 - protein, 252 aa, synthetic construct
  REGION 1..252: note = Description of Artificial Sequence: Synthetic polypeptide
  REGION 1..252: note = XENPA77 (XENP022863 [ICOS]_H0.35_L0.38 scFv)
QVQLVQSGAEVKKPGASVKVSCKASGYTFTGYYMHWVRQAPGQGLEWMGWINPHSGGTNYAQKFQGRVTMTRDTSISTAYMELSRLRSDDTAVYYCARTYYYDTSGYYHDAFDVWGQGTMVTVSSGKPGSGKPGSGKPGSGKPGSDIQMTQSPSSVSASVGDRVTITCQASQDISSLLAWYQQKPGKAPKLLIYAASSLQSGVPSRFSGSGSGTDFTLTISSLQPEDFATYYCQQAESFPWTFGQGTKVEIK

SEQ ID NO: 28634 - protein, 252 aa, synthetic construct
  REGION 1..252: note = Description of Artificial Sequence: Synthetic polypeptide
  REGION 1..252: note = XENPA78 (XENP022864 [ICOS]_H0.35_L0.42 scFv)
QVQLVQSGAEVKKPGASVKVSCKASGYTFTGYYMHWVRQAPGQGLEWMGWINPHSGGTNYAQKFQGRVTMTRDTSISTAYMELSRLRSDDTAVYYCARTYYYDTSGYYHDAFDVWGQGTMVTVSSGKPGSGKPGSGKPGSGKPGSDIQMTQSPSSVSASVGDRVTITCQASQDISSYLAWYQQKPGKAPKLLIYVASSLQSGVPSRFSGSGSGTDFTLTISSLQPEDFATYYCQQAESFPWTFGQGTKVEIK

SEQ ID NO: 28635 - protein, 252 aa, synthetic construct
  REGION 1..252: note = Description of Artificial Sequence: Synthetic polypeptide
  REGION 1..252: note = XENPA79 (XENP022865 [ICOS]_H0.35_L0.43 scFv)
QVQLVQSGAEVKKPGASVKVSCKASGYTFTGYYMHWVRQAPGQGLEWMGWINPHSGGTNYAQKFQGRVTMTRDTSISTAYMELSRLRSDDTAVYYCARTYYYDTSGYYHDAFDVWGQGTMVTVSSGKPGSGKPGSGKPGSGKPGSDIQMTQSPSSVSASVGDRVTITCQASQDISSYLAWYQQKPGKAPKLLIYAASSLQSGVPSRFSGSGSGTDFTLTISSLQPEDFATYYCQQAESFPWTFGQGTKVEIK

SEQ ID NO: 28636 - protein, 252 aa, synthetic construct
  REGION 1..252: note = Description of Artificial Sequence: Synthetic polypeptide
  REGION 1..252: note = XENPA80 (XENP022866 [ICOS]_H0.35_L0.44 scFv)
QVQLVQSGAEVKKPGASVKVSCKASGYTFTGYYMHWVRQAPGQGLEWMGWINPHSGGTNYAQKFQGRVTMTRDTSISTAYMELSRLRSDDTAVYYCARTYYYDTSGYYHDAFDVWGQGTMVTVSSGKPGSGKPGSGKPGSGKPGSDIQMTQSPSSVSASVGDRVTITCQASQDISSYLAWYQQKPGKAPKLLIYAASSLQSGVPSRFSGSGSGTDFTLTISSLQPEDFATYYCQQANSFPWTFGQGTKVEIK

SEQ ID NO: 28637 - protein, 252 aa, synthetic construct
  REGION 1..252: note = Description of Artificial Sequence: Synthetic polypeptide
  REGION 1..252: note = XENPA81 (XENP022867 [ICOS]_H0.61_L0.38 scFv)
QVQLVQSGAEVKKPGASVKVSCKASGYTFTGYYMHWVRQAPGQGLEWMGIINPHSGGTNYAQKFQGRVTMTRDTSISTAYMELSRLRSDDTAVYYCARTYYYDTSGYYHDAFDVWGQGTMVTVSSGKPGSGKPGSGKPGSGKPGSDIQMTQSPSSVSASVGDRVTITCQASQDISSLLAWYQQKPGKAPKLLIYAASSLQSGVPSRFSGSGSGTDFTLTISSLQPEDFATYYCQQAESFPWTFGQGTKVEIK

SEQ ID NO: 28638 - protein, 252 aa, synthetic construct
  REGION 1..252: note = Description of Artificial Sequence: Synthetic polypeptide
  REGION 1..252: note = XENPA82 (XENP022868 [ICOS]_H0.61_L0.42 scFv)
QVQLVQSGAEVKKPGASVKVSCKASGYTFTGYYMHWVRQAPGQGLEWMGIINPHSGGTNYAQKFQGRVTMTRDTSISTAYMELSRLRSDDTAVYYCARTYYYDTSGYYHDAFDVWGQGTMVTVSSGKPGSGKPGSGKPGSGKPGSDIQMTQSPSSVSASVGDRVTITCQASQDISSYLAWYQQKPGKAPKLLIYVASSLQSGVPSRFSGSGSGTDFTLTISSLQPEDFATYYCQQAESFPWTFGQGTKVEIK

SEQ ID NO: 28639 - protein, 252 aa, synthetic construct
  REGION 1..252: note = Description of Artificial Sequence: Synthetic polypeptide
  REGION 1..252: note = XENPA83 (XENP022869 [ICOS]_H0.61_L0.43 scFv)
QVQLVQSGAEVKKPGASVKVSCKASGYTFTGYYMHWVRQAPGQGLEWMGIINPHSGGTNYAQKFQGRVTMTRDTSISTAYMELSRLRSDDTAVYYCARTYYYDTSGYYHDAFDVWGQGTMVTVSSGKPGSGKPGSGKPGSGKPGSDIQMTQSPSSVSASVGDRVTITCQASQDISSYLAWYQQKPGKAPKLLIYAASSLQSGVPSRFSGSGSGTDFTLTISSLQPEDFATYYCQQAESFPWTFGQGTKVEIK

SEQ ID NO: 28640 - protein, 252 aa, synthetic construct
  REGION 1..252: note = Description of Artificial Sequence: Synthetic polypeptide
  REGION 1..252: note = XENPA84 (XENP022870 [ICOS]_H0.61_L0.44 scFv)
QVQLVQSGAEVKKPGASVKVSCKASGYTFTGYYMHWVRQAPGQGLEWMGIINPHSGGTNYAQKFQGRVTMTRDTSISTAYMELSRLRSDDTAVYYCARTYYYDTSGYYHDAFDVWGQGTMVTVSSGKPGSGKPGSGKPGSGKPGSDIQMTQSPSSVSASVGDRVTITCQASQDISSYLAWYQQKPGKAPKLLIYAASSLQSGVPSRFSGSGSGTDFTLTISSLQPEDFATYYCQQANSFPWTFGQGTKVEIK

SEQ ID NO: 28641 - protein, 252 aa, synthetic construct
  REGION 1..252: note = Description of Artificial Sequence: Synthetic polypeptide
  REGION 1..252: note = XENPA85 (XENP022871 [ICOS]_H0.24_L0.38 scFv)
QVQLVQSGAEVKKPGASVKVSCKASGYTFTGYYMHWVRQAPGQGLEWMGWINPHSGGTNYAQKFQGRVTMTRDTSISTAYMELSRLRSDDTAVYYCARTYYYDTSGYYHDAFDIWGQGTMVTVSSGKPGSGKPGSGKPGSGKPGSDIQMTQSPSSVSASVGDRVTITCQASQDISSLLAWYQQKPGKAPKLLIYAASSLQSGVPSRFSGSGSGTDFTLTISSLQPEDFATYYCQQAESFPWTFGQGTKVEIK

SEQ ID NO: 28642 - protein, 252 aa, synthetic construct
  REGION 1..252: note = Description of Artificial Sequence: Synthetic polypeptide
  REGION 1..252: note = XENPA86 (XENP022872 [ICOS]_H0.37_L0.38 scFv)
QVQLVQSGAEVKKPGASVKVSCKASGYTFTGYYMHWVRQAPGQGLEWMGWINPHSGGTNYAQKFQGRVTMTRDTSISTAYMELSSLRSEDTAVYYCARTYYYDTSGYYHDAFDVWGQGTMVTVSSGKPGSGKPGSGKPGSGKPGSDIQMTQSPSSVSASVGDRVTITCQASQDISSLLAWYQQKPGKAPKLLIYAASSLQSGVPSRFSGSGSGTDFTLTISSLQPEDFATYYCQQAESFPWTFGQGTKVEIK

SEQ ID NO: 28643 - protein, 252 aa, synthetic construct
  REGION 1..252: note = Description of Artificial Sequence: Synthetic polypeptide
  REGION 1..252: note = XENPA87 (XENP022873 [ICOS]_H0.40_L0.38 scFv)
QVQLVQSGAEVKKPGASVKVSCKASGYTFTGYYMHWVRQAPGQGLEWMGWINPHSGETNYAQKFQGRVTMTRDTSISTAYMELSSLRSEDTAVYYCARTYYYDTSGYYHDAFDVWGQGTMVTVSSGKPGSGKPGSGKPGSGKPGSDIQMTQSPSSVSASVGDRVTITCQASQDISSLLAWYQQKPGKAPKLLIYAASSLQSGVPSRFSGSGSGTDFTLTISSLQPEDFATYYCQQAESFPWTFGQGTKVEIK

SEQ ID NO: 28644 - protein, 252 aa, synthetic construct
  REGION 1..252: note = Description of Artificial Sequence: Synthetic polypeptide
  REGION 1..252: note = XENPA88 (XENP022874 [ICOS]_H0.44_L0.38 scFv)
QVQLVQSGAEVKKPGASVKVSCKASGYTFTGYYMHWVRQAPGQGLEWMGWINPHSGGTNYAQKFQGRVTITADESTSTAYMELSRLRSDDTAVYYCARTYYYDTSGYYHDAFDVWGQGTMVTVSSGKPGSGKPGSGKPGSGKPGSDIQMTQSPSSVSASVGDRVTITCQASQDISSLLAWYQQKPGKAPKLLIYAASSLQSGVPSRFSGSGSGTDFTLTISSLQPEDFATYYCQQAESFPWTFGQGTKVEIK

SEQ ID NO: 28645 - protein, 252 aa, synthetic construct
  REGION 1..252: note = Description of Artificial Sequence: Synthetic polypeptide
  REGION 1..252: note = XENPA89 (XENP022875 [ICOS]_H0.56_L0.38 scFv)
QVQLVQSGAEVKKPGASVKVSCKASGYTFTGYYMHWVRQAPGQGLEWMGIINPHSGGTNYAQKFQGRVTMTRDTSISTAYMELSRLRSDDTAVYYCARTYYYDTSGYYHDAFDIWGQGTMVTVSSGKPGSGKPGSGKPGSGKPGSDIQMTQSPSSVSASVGDRVTITCQASQDISSLLAWYQQKPGKAPKLLIYAASSLQSGVPSRFSGSGSGTDFTLTISSLQPEDFATYYCQQAESFPWTFGQGTKVEIK

SEQ ID NO: 28646 - protein, 252 aa, synthetic construct
  REGION 1..252: note = Description of Artificial Sequence: Synthetic polypeptide
  REGION 1..252: note = XENPA90 (XENP022876 [ICOS]_H0.62_L0.38 scFv)
QVQLVQSGAEVKKPGASVKVSCKASGYTFTGYYMHWVRQAPGQGLEWMGWINPHSGGTNYAQKFQGRVTMTEDTSTDTAYMELSRLRSDDTAVYYCARTYYYDTSGYYHDAFDVWGQGTMVTVSSGKPGSGKPGSGKPGSGKPGSDIQMTQSPSSVSASVGDRVTITCQASQDISSLLAWYQQKPGKAPKLLIYAASSLQSGVPSRFSGSGSGTDFTLTISSLQPEDFATYYCQQAESFPWTFGQGTKVEIK

SEQ ID NO: 28647 - protein, 252 aa, synthetic construct
  REGION 1..252: note = Description of Artificial Sequence: Synthetic polypeptide
  REGION 1..252: note = XENPA91 (XENP022929 [ICOS]_H0.35_L0.36 scFv)
QVQLVQSGAEVKKPGASVKVSCKASGYTFTGYYMHWVRQAPGQGLEWMGWINPHSGGTNYAQKFQGRVTMTRDTSISTAYMELSRLRSDDTAVYYCARTYYYDTSGYYHDAFDVWGQGTMVTVSSGKPGSGKPGSGKPGSGKPGSDIQMTQSPSSVSASVGDRVTITCQASQDISSLLAWYQQKPGKAPKLLIYVASSLQSGVPSRFSGSGSGTDFTLTISSLQPEDFATYYCQQAESFPWTFGQGTKVEIK

SEQ ID NO: 28648 - protein, 252 aa, synthetic construct
  REGION 1..252: note = Description of Artificial Sequence: Synthetic polypeptide
  REGION 1..252: note = XENPA92 (XENP022930 [ICOS]_H0.61_L0.36 scFv)
QVQLVQSGAEVKKPGASVKVSCKASGYTFTGYYMHWVRQAPGQGLEWMGIINPHSGGTNYAQKFQGRVTMTRDTSISTAYMELSRLRSDDTAVYYCARTYYYDTSGYYHDAFDVWGQGTMVTVSSGKPGSGKPGSGKPGSGKPGSDIQMTQSPSSVSASVGDRVTITCQASQDISSLLAWYQQKPGKAPKLLIYVASSLQSGVPSRFSGSGSGTDFTLTISSLQPEDFATYYCQQAESFPWTFGQGTKVEIK

SEQ ID NO: 28649 - protein, 252 aa, synthetic construct
  REGION 1..252: note = Description of Artificial Sequence: Synthetic polypeptide
  REGION 1..252: note = XENPA93 (XENP022938 [ICOS]_H0.24_L0.37 scFv)
QVQLVQSGAEVKKPGASVKVSCKASGYTFTGYYMHWVRQAPGQGLEWMGWINPHSGGTNYAQKFQGRVTMTRDTSISTAYMELSRLRSDDTAVYYCARTYYYDTSGYYHDAFDIWGQGTMVTVSSGKPGSGKPGSGKPGSGKPGSDIQMTQSPSSVSASVGDRVTITCQASQDISRLLAWYQQKPGKAPKLLIYAASSLQSGVPSRFSGSGSGTDFTLTISSLQPEDFATYYCQQAESFPWTFGQGTKVEIK

SEQ ID NO: 28650 - protein, 252 aa, synthetic construct
  REGION 1..252: note = Description of Artificial Sequence: Synthetic polypeptide
  REGION 1..252: note = XENPA94 (XENP022939 [ICOS]_H0.37_L0.37 scFv)
QVQLVQSGAEVKKPGASVKVSCKASGYTFTGYYMHWVRQAPGQGLEWMGWINPHSGGTNYAQKFQGRVTMTRDTSISTAYMELSSLRSEDTAVYYCARTYYYDTSGYYHDAFDVWGQGTMVTVSSGKPGSGKPGSGKPGSGKPGSDIQMTQSPSSVSASVGDRVTITCQASQDISRLLAWYQQKPGKAPKLLIYAASSLQSGVPSRFSGSGSGTDFTLTISSLQPEDFATYYCQQAESFPWTFGQGTKVEIK

SEQ ID NO: 28651 - protein, 252 aa, synthetic construct
  REGION 1..252: note = Description of Artificial Sequence: Synthetic polypeptide
  REGION 1..252: note = XENPA95 (XENP022940 [ICOS]_H0.40_L0.37 scFv)
QVQLVQSGAEVKKPGASVKVSCKASGYTFTGYYMHWVRQAPGQGLEWMGWINPHSGETNYAQKFQGRVTMTRDTSISTAYMELSSLRSEDTAVYYCARTYYYDTSGYYHDAFDVWGQGTMVTVSSGKPGSGKPGSGKPGSGKPGSDIQMTQSPSSVSASVGDRVTITCQASQDISRLLAWYQQKPGKAPKLLIYAASSLQSGVPSRFSGSGSGTDFTLTISSLQPEDFATYYCQQAESFPWTFGQGTKVEIK

SEQ ID NO: 28652 - protein, 252 aa, synthetic construct
  REGION 1..252: note = Description of Artificial Sequence: Synthetic polypeptide
  REGION 1..252: note = XENPA96 (XENP022941 [ICOS]_H0.44_L0.37 scFv)
QVQLVQSGAEVKKPGASVKVSCKASGYTFTGYYMHWVRQAPGQGLEWMGWINPHSGGTNYAQKFQGRVTITADESTSTAYMELSRLRSDDTAVYYCARTYYYDTSGYYHDAFDVWGQGTMVTVSSGKPGSGKPGSGKPGSGKPGSDIQMTQSPSSVSASVGDRVTITCQASQDISRLLAWYQQKPGKAPKLLIYAASSLQSGVPSRFSGSGSGTDFTLTISSLQPEDFATYYCQQAESFPWTFGQGTKVEIK

SEQ ID NO: 28653 - protein, 252 aa, synthetic construct
  REGION 1..252: note = Description of Artificial Sequence: Synthetic polypeptide
  REGION 1..252: note = XENPA97 (XENP022942 [ICOS]_H0.56_L0.37 scFv)
QVQLVQSGAEVKKPGASVKVSCKASGYTFTGYYMHWVRQAPGQGLEWMGIINPHSGGTNYAQKFQGRVTMTRDTSISTAYMELSRLRSDDTAVYYCARTYYYDTSGYYHDAFDIWGQGTMVTVSSGKPGSGKPGSGKPGSGKPGSDIQMTQSPSSVSASVGDRVTITCQASQDISRLLAWYQQKPGKAPKLLIYAASSLQSGVPSRFSGSGSGTDFTLTISSLQPEDFATYYCQQAESFPWTFGQGTKVEIK

SEQ ID NO: 28654 - protein, 252 aa, synthetic construct
  REGION 1..252: note = Description of Artificial Sequence: Synthetic polypeptide
  REGION 1..252: note = XENPA98 (XENP022943 [ICOS]_H0.62_L0.37 scFv)
QVQLVQSGAEVKKPGASVKVSCKASGYTFTGYYMHWVRQAPGQGLEWMGWINPHSGGTNYAQKFQGRVTMTEDTSTDTAYMELSRLRSDDTAVYYCARTYYYDTSGYYHDAFDVWGQGTMVTVSSGKPGSGKPGSGKPGSGKPGSDIQMTQSPSSVSASVGDRVTITCQASQDISRLLAWYQQKPGKAPKLLIYAASSLQSGVPSRFSGSGSGTDFTLTISSLQPEDFATYYCQQAESFPWTFGQGTKVEIK

SEQ ID NO: 28655 - protein, 252 aa, synthetic construct
  REGION 1..252: note = Description of Artificial Sequence: Synthetic polypeptide
  REGION 1..252: note = XENPA99 (XENP022944 [ICOS]_H0.35_L0.34 scFv)
QVQLVQSGAEVKKPGASVKVSCKASGYTFTGYYMHWVRQAPGQGLEWMGWINPHSGGTNYAQKFQGRVTMTRDTSISTAYMELSRLRSDDTAVYYCARTYYYDTSGYYHDAFDVWGQGTMVTVSSGKPGSGKPGSGKPGSGKPGSDIQMTQSPSSVSASVGDRVTITCQASQDISRLLAWYQQKPGKAPKLLIYVASSLQSGVPSRFSGSGSGTDFTLTISSLQPEDFATYYCQQAESFPWTFGQGTKVEIK

SEQ ID NO: 28656 - protein, 252 aa, synthetic construct
  REGION 1..252: note = Description of Artificial Sequence: Synthetic polypeptide
  REGION 1..252: note = XENPA100 (XENP022945 [ICOS]_H0.35_L0.35 scFv)
QVQLVQSGAEVKKPGASVKVSCKASGYTFTGYYMHWVRQAPGQGLEWMGWINPHSGGTNYAQKFQGRVTMTRDTSISTAYMELSRLRSDDTAVYYCARTYYYDTSGYYHDAFDVWGQGTMVTVSSGKPGSGKPGSGKPGSGKPGSDIQMTQSPSSVSASVGDRVTITCQASQDISSLLAWYQQKPGKAPKLLIYAASSLQSGVPSRFSGSGSGTDFTLTISSLQPEDFATYYCQQANSFPWTFGQGTKVEIK

SEQ ID NO: 28657 - protein, 252 aa, synthetic construct
  REGION 1..252: note = Description of Artificial Sequence: Synthetic polypeptide
  REGION 1..252: note = XENPA101 (XENP022946 [ICOS]_H0.35_L0.37 scFv)
QVQLVQSGAEVKKPGASVKVSCKASGYTFTGYYMHWVRQAPGQGLEWMGWINPHSGGTNYAQKFQGRVTMTRDTSISTAYMELSRLRSDDTAVYYCARTYYYDTSGYYHDAFDVWGQGTMVTVSSGKPGSGKPGSGKPGSGKPGSDIQMTQSPSSVSASVGDRVTITCQASQDISRLLAWYQQKPGKAPKLLIYAASSLQSGVPSRFSGSGSGTDFTLTISSLQPEDFATYYCQQAESFPWTFGQGTKVEIK

SEQ ID NO: 28658 - protein, 252 aa, synthetic construct
  REGION 1..252: note = Description of Artificial Sequence: Synthetic polypeptide
  REGION 1..252: note = XENPA102 (XENP022947 [ICOS]_H0.61_L0.34 scFv)
QVQLVQSGAEVKKPGASVKVSCKASGYTFTGYYMHWVRQAPGQGLEWMGIINPHSGGTNYAQKFQGRVTMTRDTSISTAYMELSRLRSDDTAVYYCARTYYYDTSGYYHDAFDVWGQGTMVTVSSGKPGSGKPGSGKPGSGKPGSDIQMTQSPSSVSASVGDRVTITCQASQDISRLLAWYQQKPGKAPKLLIYVASSLQSGVPSRFSGSGSGTDFTLTISSLQPEDFATYYCQQAESFPWTFGQGTKVEIK

SEQ ID NO: 28659 - protein, 252 aa, synthetic construct
  REGION 1..252: note = Description of Artificial Sequence: Synthetic polypeptide
  REGION 1..252: note = XENPA103 (XENP022948 [ICOS]_H0.61_L0.35 scFv)
QVQLVQSGAEVKKPGASVKVSCKASGYTFTGYYMHWVRQAPGQGLEWMGIINPHSGGTNYAQKFQGRVTMTRDTSISTAYMELSRLRSDDTAVYYCARTYYYDTSGYYHDAFDVWGQGTMVTVSSGKPGSGKPGSGKPGSGKPGSDIQMTQSPSSVSASVGDRVTITCQASQDISSLLAWYQQKPGKAPKLLIYAASSLQSGVPSRFSGSGSGTDFTLTISSLQPEDFATYYCQQANSFPWTFGQGTKVEIK

SEQ ID NO: 28660 - protein, 252 aa, synthetic construct
  REGION 1..252: note = Description of Artificial Sequence: Synthetic polypeptide
  REGION 1..252: note = XENPA104 (XENP022949 [ICOS]_H0.61_L0.37 scFv)
QVQLVQSGAEVKKPGASVKVSCKASGYTFTGYYMHWVRQAPGQGLEWMGIINPHSGGTNYAQKFQGRVTMTRDTSISTAYMELSRLRSDDTAVYYCARTYYYDTSGYYHDAFDVWGQGTMVTVSSGKPGSGKPGSGKPGSGKPGSDIQMTQSPSSVSASVGDRVTITCQASQDISRLLAWYQQKPGKAPKLLIYAASSLQSGVPSRFSGSGSGTDFTLTISSLQPEDFATYYCQQAESFPWTFGQGTKVEIK

SEQ ID NO: 28661 - protein, 252 aa, synthetic construct
  REGION 1..252: note = Description of Artificial Sequence: Synthetic polypeptide
  REGION 1..252: note = XENPA105 (XENP023086 [ICOS]_H0.37_L0 scFv)
QVQLVQSGAEVKKPGASVKVSCKASGYTFTGYYMHWVRQAPGQGLEWMGWINPHSGGTNYAQKFQGRVTMTRDTSISTAYMELSSLRSEDTAVYYCARTYYYDTSGYYHDAFDVWGQGTMVTVSSGKPGSGKPGSGKPGSGKPGSDIQMTQSPSSVSASVGDRVTITCRASQGISRLLAWYQQKPGKAPKLLIYVASSLQSGVPSRFSGSGSGTDFTLTISSLQPEDFATYYCQQANSFPWTFGQGTKVEIK

SEQ ID NO: 28662 - protein, 252 aa, synthetic construct
  REGION 1..252: note = Description of Artificial Sequence: Synthetic polypeptide
  REGION 1..252: note = XENPA106 (XENP023087 [ICOS]_H0.64_L0 scFv)
QVQLVQSGAEVKKPGASVKVSCKASGYTFTGYYMHWVRQAPGQGLEWMGWINPHSGGTNYAQKFQGRVTMTEDTSTDTAYMELSSLRSEDTAVYYCARTYYYDTSGYYHDAFDVWGQGTMVTVSSGKPGSGKPGSGKPGSGKPGSDIQMTQSPSSVSASVGDRVTITCRASQGISRLLAWYQQKPGKAPKLLIYVASSLQSGVPSRFSGSGSGTDFTLTISSLQPEDFATYYCQQANSFPWTFGQGTKVEIK

SEQ ID NO: 28663 - protein, 252 aa, synthetic construct
  REGION 1..252: note = Description of Artificial Sequence: Synthetic polypeptide
  REGION 1..252: note = XENPA107 (XENP023088 [ICOS]_H0.66_L0 scFv)
QVQLVQSGAEVKKPGASVKVSCKASGYTFTGYYMHWVRQAPGQGLEWMGWINPHSGETIYAQKFQGRVTMTRDTSISTAYMELSSLRSEDTAVYYCARTYYYDTSGYYHDAFDVWGQGTMVTVSSGKPGSGKPGSGKPGSGKPGSDIQMTQSPSSVSASVGDRVTITCRASQGISRLLAWYQQKPGKAPKLLIYVASSLQSGVPSRFSGSGSGTDFTLTISSLQPEDFATYYCQQANSFPWTFGQGTKVEIK

SEQ ID NO: 28664 - protein, 252 aa, synthetic construct
  REGION 1..252: note = Description of Artificial Sequence: Synthetic polypeptide
  REGION 1..252: note = XENPA108 (XENP023089 [ICOS]_H0.67_L0 scFv)
QVQLVQSGAEVKKPGASVKVSCKASGYTFTGYYMHWVRQAPGQGLEWMGWINPHSGETIYAQKFQGRVTMTEDTSTDTAYMELSSLRSEDTAVYYCARTYYYDTSGYYHDAFDVWGQGTMVTVSSGKPGSGKPGSGKPGSGKPGSDIQMTQSPSSVSASVGDRVTITCRASQGISRLLAWYQQKPGKAPKLLIYVASSLQSGVPSRFSGSGSGTDFTLTISSLQPEDFATYYCQQANSFPWTFGQGTKVEIK

SEQ ID NO: 28665 - protein, 252 aa, synthetic construct
  REGION 1..252: note = Description of Artificial Sequence: Synthetic polypeptide
  REGION 1..252: note = XENPA109 (XENP023409 [ICOS]_H0.66_L0.34 scFv)
QVQLVQSGAEVKKPGASVKVSCKASGYTFTGYYMHWVRQAPGQGLEWMGWINPHSGETIYAQKFQGRVTMTRDTSISTAYMELSSLRSEDTAVYYCARTYYYDTSGYYHDAFDVWGQGTMVTVSSGKPGSGKPGSGKPGSGKPGSDIQMTQSPSSVSASVGDRVTITCQASQDISRLLAWYQQKPGKAPKLLIYVASSLQSGVPSRFSGSGSGTDFTLTISSLQPEDFATYYCQQAESFPWTFGQGTKVEIK

SEQ ID NO: 28666 - protein, 6 aa, synthetic construct
  REGION 1..6: note = Description of Artificial Sequence: Synthetic 6xHis tag
HHHHHH

SEQ ID NO: 28667 - protein, 13 aa, synthetic construct
  REGION 1..13: note = Description of Artificial Sequence: Synthetic peptide
ASTKGPSVFPLAP

SEQ ID NO: 28668 - protein, 13 aa, synthetic construct
  REGION 1..13: note = Description of Artificial Sequence: Synthetic peptide
RTVAAPSVFIFPP

SEQ ID NO: 28669 - protein, 329 aa, synthetic construct
  REGION 1..329: note = Description of Artificial Sequence: Synthetic polypeptide
  REGION 1..329: note = Fab side heavy chain
ASTKGPSVFPLAPSSKSTSGGTAALGCLVKDYFPEPVTVSWNSGALTSGVHTFPAVLQSSGLYSLSSVVTVPSSSLGTQTYICNVNHKPSDTKVDKKVEPKSCDKTHTCPPCPAPPVAGPSVFLFPPKPKDTLMISRTPEVTCVVVDVKHEDPEVKFNWYVDGVEVHNAKTKPREEEYNSTYRVVSVLTVLHQDWLNGKEYKCKVSNKALPAPIEKTISKAKGQPREPQVYTLPPSREEMTKNQVSLTCDVSGFYPSDIAVEWESDGQPENNYKTTPPVLDSDGSFFLYSKLTVDKSRWEQGDVFSCSVMHEALHNHYTQKSLSLSPGK

SEQ ID NO: 28670 - protein, 231 aa, synthetic construct; identical to SEQ ID NO: 2397
  REGION 1..231: note = Description of Artificial Sequence: Synthetic polypeptide
  REGION 1..231: note = scFv heavy chain

SEQ ID NO: 28671 - protein, 107 aa, synthetic construct [sequence omitted]

SEQ ID NO: 28672 - protein, 329 aa, synthetic construct; identical to SEQ ID NO: 28669
  REGION 1..329: note = Description of Artificial Sequence: Synthetic polypeptide
  REGION 1..329: note = Fab side heavy chain

SEQ ID NO: 28673 - protein, 231 aa, synthetic construct
  REGION 1..231: note = Description of Artificial Sequence: Synthetic polypeptide
  REGION 1..231: note = scFv heavy chain
EPKSSDKTHTCPPCPAPPVAGPSVFLFPPKPKDTLMISRTPEVTCVVVDVKHEDPEVKFNWYVDGVEVHNAKTKPREEQYNSTYRVVSVLTVLHQDWLNGKEYKCKVSNKALPAPIEKTISKAKGQPREPQVYTLPPSREEMTKNQVKLTCLVKGFYPSDIAVEWESNGQPENNYKTTPPVLDSDGSFFLYSKLTVDKSRWQQGNVFSCSVMHEALHNHYTQKSLSLSPGK

SEQ ID NO: 28674 - protein, 329 aa, synthetic construct
  REGION 1..329: note = Description of Artificial Sequence: Synthetic polypeptide
  REGION 1..329: note = Fab side heavy chain
ASTKGPSVFPLAPSSKSTSGGTAALGCLVKDYFPEPVTVSWNSGALTSGVHTFPAVLQSSGLYSLSSVVTVPSSSLGTQTYICNVNHKPSDTKVDKKVEPKSCDKTHTCPPCPAPPVAGPSVFLFPPKPKDTLMISRTPEVTCVVVDVKHEDPEVKFNWYVDGVEVHNAKTKPREEEYNSTYRVVSVLTVLHQDWLNGKEYKCKVSNKALPAPIEKTISKAKGQPREPQVYTLPPSREEMTKNQVSLTCEVSGFYPSDIAVEWESDGQPENNYKTTPPVLDSDGSFFLYSKLTVDKSRWEQGDVFSCSVMHEALHNHYTQKSLSLSPGK

SEQ ID NO: 28675 - protein, 231 aa, synthetic construct; identical to SEQ ID NO: 28673
  REGION 1..231: note = Description of Artificial Sequence: Synthetic polypeptide
  REGION 1..231: note = scFv heavy chain

SEQ ID NO: 28676 - protein, 330 aa, synthetic construct
  REGION 1..330: note = Description of Artificial Sequence: Synthetic polypeptide
  REGION 1..330: note = Fab side heavy chain
ASTKGPSVFPLAPSSKSTSGGTAALGCLVKDYFPEPVTVSWNSGALTSGVHTFPAVLQSSGLYSLSSVVTVPSSSLGTQTYICNVNHKPSDTKVDKKVEPKSCDKTHTCPPCPAPPVAGPSVFLFPPKPKDTLMISRTPEVTCVVVDVKHEDPEVKFNWYVDGVEVHNAKTKPREEEYNSTYRVVSVLTVLHQDWLNGKEYKCKVSNKALPAPIEKTISKAKGQPREPQVYTLPPSREEMTENEVSLTCLVKSGFYPSDIAVEWESDGQPENNYKTTPPVLDSDGSFFLYSKLEVDKSRWEQGDVFSCSVMHEALHNHYTQKSLSLSPGK

SEQ ID NO: 28677 - protein, 231 aa, synthetic construct
  REGION 1..231: note = Description of Artificial Sequence: Synthetic polypeptide
  REGION 1..231: note = scFv heavy chain
EPKSSDKTHTCPPCPAPPVAGPSVFLFPPKPKDTLMISRTPEVTCVVVDVKHEDPEVKFNWYVDGVEVHNAKTKPREEQYNSTYRVVSVLTVLHQDWLNGKEYKCKVSNKALPAPIEKTISKAKGQPREPQVYTLPPSREEMTKNQVSLTCLVKGFYPSDIAVEWESNGQPENNYKTTPPVLDSKGSFFLYSKLTVDKSRWQQGNVFSCSVMHEALHNHYTQKSLSLSPGK

SEQ ID NO: 28678 - protein, 329 aa, synthetic construct
  REGION 1..329: note = Description of Artificial Sequence: Synthetic polypeptide
  REGION 1..329: note = Fab side heavy chain
ASTKGPSVFPLAPSSKSTSGGTAALGCLVKDYFPEPVTVSWNSGALTSGVHTFPAVLQSSGLYSLSSVVTVPSSSLGTQTYICNVNHKPSDTKVDKKVEPKSCDKTHTCPPCPAPPVAGPSVFLFPPKPKDTLMISRTPEVTCVVVDVKHEDPEVKFNWYVDGVEVHNAKTKPREEEYNSTYRVVSVLTVLHQDWLNGKEYKCKVSNKALPAPIEKTISKAKGQPREPQVYTLPPSRDELTKNQVSLTCDVSGFYPSDIAVEWESDGQPENNYKTTPPVLDSDGSFFLYSKLTVDKSRWEQGDVFSCSVMHEALHNHYTQKSLSLSPGK

SEQ ID NO: 28679 - protein, 231 aa, synthetic construct
  REGION 1..231: note = Description of Artificial Sequence: Synthetic polypeptide
  REGION 1..231: note = scFv heavy chain
EPKSSDKTHTCPPCPAPPVAGPSVFLFPPKPKDTLMISRTPEVTCVVVDVKHEDPEVKFNWYVDGVEVHNAKTKPREEQYASTYRVVSVLTVLHQDWLNGKEYKCKVSNKALPAPIEKTISKAKGQPREPQVYTLPPSREQMTKNQVKLTCLVKGFYPSDIAVEWESNGQPENNYKTTPPVLDSDGSFFLYSKLTVDKSRWQQGNVFSCSVMHEALHNHYTQKSLSLSPGK

SEQ ID NO: 28680 - protein, 329 aa, synthetic construct
  REGION 1..329: note = Description of Artificial Sequence: Synthetic polypeptide
  REGION 1..329: note = Fab side heavy chain
ASTKGPSVFPLAPSSKSTSGGTAALGCLVKDYFPEPVTVSWNSGALTSGVHTFPAVLQSSGLYSLSSVVTVPSSSLGTQTYICNVNHKPSDTKVDKKVEPKSCDKTHTCPPCPAPPVAGPSVFLFPPKPKDTLMISRTPEVTCVVVDVKHEDPEVKFNWYVDGVEVHNAKTKPREEEYASTYRVVSVLTVLHQDWLNGKEYKCKVSNKALPAPIEKTISKAKGQPREPQVYTLPPSREEMTKNQVSLTCDVSGFYPSDIAVEWESDGQPENNYKTTPPVLDSDGSFFLYSKLTVDKSRWEQGDVFSCSVMHEALHNHYTQKSLSLSPGK

SEQ ID NO: 28681 - protein, 231 aa, synthetic construct; identical to SEQ ID NO: 28679
  REGION 1..231: note = Description of Artificial Sequence: Synthetic polypeptide
  REGION 1..231: note = scFv heavy chain

SEQ ID NO: 28682 - protein, 329 aa, synthetic construct
  REGION 1..329: note = Description of Artificial Sequence: Synthetic polypeptide
  REGION 1..329: note = Fab side heavy chain
ASTKGPSVFPLAPSSKSTSGGTAALGCLVKDYFPEPVTVSWNSGALTSGVHTFPAVLQSSGLYSLSSVVTVPSSSLGTQTYICNVNHKPSDTKVDKKVEPKSCDKTHTCPPCPAPPVAGPSVFLFPPKPKDTLMISRTPEVTCVVVDVKHEDPEVKFNWYVDGVEVHNAKTKPREEEYSSTYRVVSVLTVLHQDWLNGKEYKCKVSNKALPAPIEKTISKAKGQPREPQVYTLPPSREEMTKNQVSLTCDVSGFYPSDIAVEWESDGQPENNYKTTPPVLDSDGSFFLYSKLTVDKSRWEQGDVFSCSVMHEALHNHYTQKSLSLSPGK

SEQ ID NO: 28683 - protein, 231 aa, synthetic construct
  REGION 1..231: note = Description of Artificial Sequence: Synthetic polypeptide
  REGION 1..231: note = scFv heavy chain
EPKSSDKTHTCPPCPAPPVAGPSVFLFPPKPKDTLMISRTPEVTCVVVDVKHEDPEVKFNWYVDGVEVHNAKTKPREEQYSSTYRVVSVLTVLHQDWLNGKEYKCKVSNKALPAPIEKTISKAKGQPREPQVYTLPPSREQMTKNQVKLTCLVKGFYPSDIAVEWESNGQPENNYKTTPPVLDSDGSFFLYSKLTVDKSRWQQGNVFSCSVMHEALHNHYTQKSLSLSPGK

SEQ ID NO: 28684 - protein, 327 aa, synthetic construct
  REGION 1..327: note = Description of Artificial Sequence: Synthetic polypeptide
  REGION 1..327: note = Fab side heavy chain
ASTKGPSVFPLAPCSRSTSESTAALGCLVKDYFPEPVTVSWNSGALTSGVHTFPAVLQSSGLYSLSSVVTVPSSSLGTKTYTCNVDHKPSDTKVDKRVESKYGPPCPPCPAPEFLGGPSVFLFPPKPKDTLMISRTPEVTCVVVDVKQEDPEVQFNWYVDGVEVHNAKTKPREEEFNSTYRVVSVLTVLHQDWLNGKEYKCKVSNKGLPSSIEKTISKAKGQPREPQVYTLPPSQEEMTKNQVSLTCDVSGFYPSDIAVEWESDGQPENNYKTTPPVLDSDGSFFLYSKLTVDKSRWEEGDVFSCSVMHEALHNHYTQKSLSLSLGK

SEQ ID NO: 28685 - protein, 229 aa, synthetic construct
  REGION 1..229: note = Description of Artificial Sequence: Synthetic polypeptide
  REGION 1..229: note = scFv heavy chain
ESKYGPPCPPCPAPEFLGGPSVFLFPPKPKDTLMISRTPEVTCVVVDVKQEDPEVQFNWYVDGVEVHNAKTKPREEQFNSTYRVVSVLTVLHQDWLNGKEYKCKVSNKGLPSSIEKTISKAKGQPREPQVYTLPPSQEQMTKNQVKLTCLVKGFYPSDIAVEWESNGQPENNYKTTPPVLDSDGSFFLYSKLTVDKSRWQEGNVFSCSVMHEALHNHYTQKSLSLSLGK

SEQ ID NO: 28686 - protein, 326 aa, synthetic construct
  REGION 1..326: note = Description of Artificial Sequence: Synthetic polypeptide
  REGION 1..326: note = Fab side heavy chain
ASTKGPSVFPLAPCSRSTSESTAALGCLVKDYFPEPVTVSWNSGALTSGVHTFPAVLQSSGLYSLSSVVTVPSSNFGTQTYTCNVDHKPSDTKVDKTVERKCCVECPPCPAPPVAGPSVFLFPPKPKDTLMISRTPEVTCVVVDVSHEDPEVQFNWYVDGVEVHNAKTKPREEEFNSTFRVVSVLTVVHQDWLNGKEYKCKVSNKGLPAPIEKTISKTKGQPREPQVYTLPPSREEMTKNQVSLTCDVSGFYPSDIAVEWESDGQPENNYKTTPPMLDSDGSFFLYSKLTVDKSRWEQGDVFSCSVMHEALHNHYTQKSLSLSPGK

SEQ ID NO: 28687 - protein, 228 aa, synthetic construct
  REGION 1..228: note = Description of Artificial Sequence: Synthetic polypeptide
  REGION 1..228: note = scFv heavy chain
ERKCSVECPPCPAPPVAGPSVFLFPPKPKDTLMISRTPEVTCVVVDVSHEDPEVQFNWYVDGVEVHNAKTKPREEQFNSTFRVVSVLTVVHQDWLNGKEYKCKVSNKGLPAPIEKTISKTKGQPREPQVYTLPPSREQMTKNQVKLTCLVKGFYPSDIAVEWESNGQPENNYKTTPPMLDSDGSFFLYSKLTVDKSRWQQGNVFSCSVMHEALHNHYTQKSLSLSPGK

SEQ ID NO: 28688 - protein, 326 aa, synthetic construct
  REGION 1..326: note = Description of Artificial Sequence: Synthetic polypeptide
  REGION 1..326: note = Fab side heavy chain
ASTKGPSVFPLAPCSRSTSESTAALGCLVKDYFPEPVTVSWNSGALTSGVHTFPAVLQSSGLYSLSSVVTVPSSNFGTQTYTCNVDHKPSDTKVDKTVERKCCVECPPCPAPPVAGPSVFLFPPKPKDTLMISRTPEVTCVVVDVKHEDPEVQFNWYVDGVEVHNAKTKPREEEFNSTFRVVSVLTVVHQDWLNGKEYKCKVSNKGLPAPIEKTISKTKGQPREPQVYTLPPSREEMTKNQVSLTCDVSGFYPSDIAVEWESDGQPENNYKTTPPMLDSDGSFFLYSKLTVDKSRWEQGDVFSCSVMHEALHNHYTQKSLSLSPGK

SEQ ID NO: 28689 - protein, 228 aa, synthetic construct
  REGION 1..228: note = Description of Artificial Sequence: Synthetic polypeptide
  REGION 1..228: note = scFv heavy chain
ERKCSVECPPCPAPPVAGPSVFLFPPKPKDTLMISRTPEVTCVVVDVKHEDPEVQFNWYVDGVEVHNAKTKPREEQFNSTFRVVSVLTVVHQDWLNGKEYKCKVSNKGLPAPIEKTISKTKGQPREPQVYTLPPSREQMTKNQVKLTCLVKGFYPSDIAVEWESNGQPENNYKTTPPMLDSDGSFFLYSKLTVDKSRWQQGNVFSCSVMHEALHNHYTQKSLSLSPGK

SEQ ID NO: 28690 - protein, 113 aa, synthetic construct [sequence omitted]

SEQ ID NO: 28691 - protein, 5 aa, synthetic construct
  REGION 1..5: note = Description of Artificial Sequence: Synthetic peptide
  REGION 1..5: note = XENP016432 vhCDR1
NSGMH

SEQ ID NO: 28692 - protein, 17 aa, synthetic construct
  REGION 1..17: note = Description of Artificial Sequence: Synthetic peptide
  REGION 1..17: note = XENP016432 vhCDR2
VIWYDGSKRYYADSVKG

SEQ ID NO: 28693 - protein, 4 aa, synthetic construct
  REGION 1..4: note = Description of Artificial Sequence: Synthetic peptide
  REGION 1..4: note = XENP016432 vhCDR3
NDDY

SEQ ID NO: 28694 - protein, 442 aa, synthetic construct; identical to SEQ ID NO: 16161
  REGION 1..442: note = Description of Artificial Sequence: Synthetic polypeptide
  REGION 1..442: note = XENP016432 Full length HC

SEQ ID NO: 28695 - protein, 107 aa, synthetic construct [sequence omitted]

SEQ ID NO: 28696 - protein, 11 aa, synthetic construct
  REGION 1..11: note = Description of Artificial Sequence: Synthetic peptide
  REGION 1..11: note = XENP016432 vlCDR1
RASQSVSSYLA

SEQ ID NO: 28697 - protein, 7 aa, synthetic construct
  REGION 1..7: note = Description of Artificial Sequence: Synthetic peptide
  REGION 1..7: note = XENP016432 vlCDR2
DASNRAT

SEQ ID NO: 28698 - protein, 9 aa, synthetic construct
  REGION 1..9: note = Description of Artificial Sequence: Synthetic peptide
  REGION 1..9: note = XENP016432 vlCDR3
QQSSNWPRT

SEQ ID NO: 28699 - protein, 214 aa, synthetic construct; identical to SEQ ID NO: 16146
  REGION 1..214: note = Description of Artificial Sequence: Synthetic polypeptide
  REGION 1..214: note = XENP016432 Full length light chain

SEQ ID NO: 28700 - protein, 127 aa, synthetic construct; identical to SEQ ID NO: 26823
  REGION 1..127: note = Description of Artificial Sequence: Synthetic polypeptide
  REGION 1..127: note = VH of XENP024120

SEQ ID NO: 28701 - protein, 7 aa, synthetic construct
  REGION 1..7: note = Description of Artificial Sequence: Synthetic peptide
  REGION 1..7: note = XENP024120 vhCDR1
SGAYYWS

SEQ ID NO: 28702 - protein, 16 aa, synthetic construct
  REGION 1..16: note = Description of Artificial Sequence: Synthetic peptide
  REGION 1..16: note = XENP024120 vhCDR2
YIYYNGNTYYNPSLRS

SEQ ID NO: 28703 - protein, 17 aa, synthetic construct
  REGION 1..17: note = Description of Artificial Sequence: Synthetic peptide
  REGION 1..17: note = XENP024120 vhCDR3
ASDYVWGGYHYFDAFDL

SEQ ID NO: 28704 - protein, 456 aa, synthetic construct; identical to SEQ ID NO: 27536
  REGION 1..456: note = Description of Artificial Sequence: Synthetic polypeptide
  REGION 1..456: note = XENP024120 Full length HC

SEQ ID NO: 28705 - protein, 110 aa, synthetic construct; identical to SEQ ID NO: 26838
  REGION 1..110: note = Description of Artificial Sequence: Synthetic polypeptide
  REGION 1..110: note = VL of XENP024120

SEQ ID NO: 28706 - protein, 13 aa, synthetic construct
  REGION 1..13: note = Description of Artificial Sequence: Synthetic peptide
  REGION 1..13: note = XENP024120 vlCDR1
SGSNSNIGSNSVN

SEQ ID NO: 28707 - protein, 7 aa, synthetic construct
  REGION 1..7: note = Description of Artificial Sequence: Synthetic peptide
  REGION 1..7: note = XENP024120 vlCDR2
GNNQRPS

SEQ ID NO: 28708 - protein, 11 aa, synthetic construct
  REGION 1..11: note = Description of Artificial Sequence: Synthetic peptide
  REGION 1..11: note = XENP024120 vlCDR3
AAWDDSLNGPV

SEQ ID NO: 28709 - protein, 216 aa, synthetic construct; identical to SEQ ID NO: 26837
  REGION 1..216: note = Description of Artificial Sequence: Synthetic polypeptide
  REGION 1..216: note = XENP024120 Full length light chain

SEQ ID NO: 28710 - protein, 123 aa, synthetic construct; identical to SEQ ID NO: 26303
  REGION 1..123: note = Description of Artificial Sequence: Synthetic polypeptide
  REGION 1..123: note = VH of XENP024121

SEQ ID NO: 28711 - protein, 5 aa, synthetic construct
  REGION 1..5: note = Description of Artificial Sequence: Synthetic peptide
  REGION 1..5: note = XENP024121 vhCDR1
TYWMH

SEQ ID NO: 28712 - protein, 17 aa, synthetic construct
  REGION 1..17: note = Description of Artificial Sequence: Synthetic peptide
  REGION 1..17: note = XENP024121 vhCDR2
EIDPSDSYVNYNQNFKG

SEQ ID NO: 28713 - protein, 14 aa, synthetic construct
  REGION 1..14: note = Description of Artificial Sequence: Synthetic peptide
  REGION 1..14: note = XENP024121 vhCDR3
SPDYYGTSLAWFDY

SEQ ID NO: 28714 - protein, 452 aa, synthetic construct; identical to SEQ ID NO: 26682
  REGION 1..452: note = Description of Artificial Sequence: Synthetic polypeptide
  REGION 1..452: note = XENP024121 Full length HC

SEQ ID NO: 28715 - protein, 111 aa, synthetic construct; identical to SEQ ID NO: 27008
  REGION 1..111: note = Description of Artificial Sequence: Synthetic polypeptide
  REGION 1..111: note = VL of XENP024121

SEQ ID NO: 28716 - protein, 15 aa, synthetic construct
  REGION 1..15: note = Description of Artificial Sequence: Synthetic peptide
  REGION 1..15: note = XENP024121 vlCDR1
RASESVDNYGMSFMN

SEQ ID NO: 28717 - protein, 7 aa, synthetic construct
  REGION 1..7: note = Description of Artificial Sequence: Synthetic peptide
  REGION 1..7: note = XENP024121 vlCDR2
AASNQGS

SEQ ID NO: 28718 - protein, 9 aa, synthetic construct
  REGION 1..9: note = Description of Artificial Sequence: Synthetic peptide
  REGION 1..9: note = XENP024121 vlCDR3
QQSKEVPYT

SEQ ID NO: 28719 - protein, 218 aa, synthetic construct; identical to SEQ ID NO: 27551
  REGION 1..218: note = Description of Artificial Sequence: Synthetic polypeptide
  REGION 1..218: note = XENP024121 Full length light chain

SEQ ID NO: 28720 - protein, 122 aa, synthetic construct; identical to SEQ ID NO: 2872
  REGION 1..122: note = Description of Artificial Sequence: Synthetic polypeptide
  REGION 1..122: note = VH of XENP019686

SEQ ID NO: 28721 - protein, 5 aa, synthetic construct
  REGION 1..5: note = Description of Artificial Sequence: Synthetic peptide
  REGION 1..5: note = XENP019686 vhCDR1
NYWMN

SEQ ID NO: 28722 - protein, 19 aa, synthetic construct
  REGION 1..19: note = Description of Artificial Sequence: Synthetic peptide
  REGION 1..19: note = XENP019686 vhCDR2
EIRLYSNNYATHYAESVKG

SEQ ID NO: 28723 - protein, 11 aa, synthetic construct
  REGION 1..11: note = Description of Artificial Sequence: Synthetic peptide
  REGION 1..11: note = XENP019686 vhCDR3
YYGNYGGYFDV

SEQ ID NO: 28724 - protein, 451 aa, synthetic construct; identical to SEQ ID NO: 21381
  REGION 1..451: note = Description of Artificial Sequence: Synthetic polypeptide
  REGION 1..451: note = XENP019686 Full length HC

SEQ ID NO: 28725 - protein, 107 aa, synthetic construct; identical to SEQ ID NO: 2871
  REGION 1..107: note = Description of Artificial Sequence: Synthetic polypeptide
  REGION 1..107: note = VL of XENP019686

SEQ ID NO: 28726 - protein, 11 aa, synthetic construct
  REGION 1..11: note = Description of Artificial Sequence: Synthetic peptide
  REGION 1..11: note = XENP019686 vlCDR1
RASQSVGNDVA

SEQ ID NO: 28727 - protein, 7 aa, synthetic construct
  REGION 1..7: note = Description of Artificial Sequence: Synthetic peptide
  REGION 1..7: note = XENP019686 vlCDR2
YASHRYT

SEQ ID NO: 28728 - protein, 9 aa, synthetic construct
  REGION 1..9: note = Description of Artificial Sequence: Synthetic peptide
  REGION 1..9: note = XENP019686 vlCDR3
QQDFSSPRT

SEQ ID NO: 28729 - protein, 214 aa, synthetic construct; identical to SEQ ID NO: 21486
  REGION 1..214: note = Description of Artificial Sequence: Synthetic polypeptide
  REGION 1..214: note = XENP019686 Full length light chain

SEQ ID NO: 28730 - protein, 120 aa, synthetic construct; identical to SEQ ID NO: 3091
  REGION 1..120: note = Description of Artificial Sequence: Synthetic polypeptide
  REGION 1..120: note = VH of XENP020156

SEQ ID NO: 28731 - protein, 5 aa, synthetic construct
  REGION 1..5: note = Description of Artificial Sequence: Synthetic peptide
  REGION 1..5: note = XENP020156 vhCDR1
NYWLG

SEQ ID NO: 28732 - protein, 17 aa, synthetic construct
  REGION 1..17: note = Description of Artificial Sequence: Synthetic peptide
  REGION 1..17: note = XENP020156 vhCDR2
NFYPGSSNTYYNEKFQG

SEQ ID NO: 28733 - protein, 11 aa, synthetic construct
  REGION 1..11: note = Description of Artificial Sequence: Synthetic peptide
  REGION 1..11: note = XENP020156 vhCDR3
HYGTNYRYFDV

SEQ ID NO: 28734 - protein, 449 aa, synthetic construct; identical to SEQ ID NO: 21751
  REGION 1..449: note = Description of Artificial Sequence: Synthetic polypeptide
  REGION 1..449: note = XENP020156 Full length HC

SEQ ID NO: 28735 - protein, 107 aa, synthetic construct; identical to SEQ ID NO: 3092
  REGION 1..107: note = Description of Artificial Sequence: Synthetic polypeptide
  REGION 1..107: note = VL of XENP020156

SEQ ID NO: 28736 - protein, 11 aa, synthetic construct
  REGION 1..11: note = Description of Artificial Sequence: Synthetic peptide
  REGION 1..11: note = XENP020156 vlCDR1
RASQSVSNDVA

SEQ ID NO: 28737 - protein, 7 aa, synthetic construct
  REGION 1..7: note = Description of Artificial Sequence: Synthetic peptide
  REGION 1..7: note = XENP020156 vlCDR2
YASNRYT

SEQ ID NO: 28738 - protein, 9 aa, synthetic construct
  REGION 1..9: note = Description of Artificial Sequence: Synthetic peptide
  REGION 1..9: note = XENP020156 vlCDR3
QQDYSSPYT

SEQ ID NO: 28739 - protein, 214 aa, synthetic construct; identical to SEQ ID NO: 3140
  REGION 1..214: note = Description of Artificial Sequence: Synthetic polypeptide
  REGION 1..214: note = XENP020156 Full length light chain

SEQ ID NO: 28740 - protein, 122 aa, synthetic construct; identical to SEQ ID NO: 2872
  REGION 1..122: note = Description of Artificial Sequence: Synthetic polypeptide
  REGION 1..122: note = VH of XENP19690

SEQ ID NO: 28741 - protein, 5 aa, synthetic construct
  REGION 1..5: note = Description of Artificial Sequence: Synthetic peptide
  REGION 1..5: note = XENP19690 vhCDR1
NYWMN

SEQ ID NO: 28742 - protein, 19 aa, synthetic construct
  REGION 1..19: note = Description of Artificial Sequence: Synthetic peptide
  REGION 1..19: note = XENP19690 vhCDR2
EIRLYSNNYATHYAESVKG

SEQ ID NO: 28743 - protein, 11 aa, synthetic construct
  REGION 1..11: note = Description of Artificial Sequence: Synthetic peptide
  REGION 1..11: note = XENP19690 vhCDR3
YYGNYGGYFDV

SEQ ID NO: 28744 - protein, 20 aa, synthetic construct
  REGION 1..20: note = Description of Artificial Sequence: Synthetic peptide
  REGION 1..20: note = XENP19690 scFv
GKPGSGKPGSGKPGSGKPGS

SEQ ID NO: 28745 - protein, 107 aa, synthetic construct; identical to SEQ ID NO: 2871
  REGION 1..107: note = Description of Artificial Sequence: Synthetic polypeptide
  REGION 1..107: note = VL of XENP19690

SEQ ID NO: 28746 - protein, 11 aa, synthetic construct
  REGION 1..11: note = Description of Artificial Sequence: Synthetic peptide
  REGION 1..11: note = XENP19690 vlCDR1
RASQSVGNDVA

SEQ ID NO: 28747 - protein, 7 aa, synthetic construct
  REGION 1..7: note = Description of Artificial Sequence: Synthetic peptide
  REGION 1..7: note = XENP19690 vlCDR2
YASHRYT

SEQ ID NO: 28748 - protein, 9 aa, synthetic construct
  REGION 1..9: note = Description of Artificial Sequence: Synthetic peptide
  REGION 1..9: note = XENP19690 vlCDR3
QQDFSSPRT

SEQ ID NO: 28749 - protein, 249 aa, synthetic construct; identical to SEQ ID NO: 16051
  REGION 1..249: note = Description of Artificial Sequence: Synthetic polypeptide
  REGION 1..249: note = XENP19690 scFv

SEQ ID NO: 28750 - protein, 122 aa, synthetic construct; identical to SEQ ID NO: 15593
  REGION 1..122: note = Description of Artificial Sequence: Synthetic polypeptide

SEQ ID NO: 28751 - protein, 5 aa, synthetic construct
  REGION 1..5: note = Description of Artificial Sequence: Synthetic peptide
NYWMN

SEQ ID NO: 28752 - protein, 19 aa, synthetic construct
  REGION 1..19: note = Description of Artificial Sequence: Synthetic peptide
EIRLYSNNYATHYAESVKG

SEQ ID NO: 28753 - protein, 11 aa, synthetic construct
  REGION 1..11: note = Description of Artificial Sequence: Synthetic peptide
YYGNYGGYFDV

SEQ ID NO: 28754 - protein, 20 aa, synthetic construct
  REGION 1..20: note = Description of Artificial Sequence: Synthetic peptide
GKPGSGKPGSGKPGSGKPGS

SEQ ID NO: 28755 - protein, 107 aa, synthetic construct
  REGION 1..107: note = Description of Artificial Sequence: Synthetic polypeptide
EIVLTQSPATLSVSPGERVTLTCRASQSVGNDVAWYQQKPGQAPRLLINYASHRYTSVPDRFTGSGYGTEFTLTISSVQSEDFAVYYCQQDWSSPRTFGGGTKVEIK

SEQ ID NO: 28756 - protein, 11 aa, synthetic construct
  REGION 1..11: note = Description of Artificial Sequence: Synthetic peptide
RASQSVGNDVA

SEQ ID NO: 28757 - protein, 7 aa, synthetic construct
  REGION 1..7: note = Description of Artificial Sequence: Synthetic peptide
YASHRYT

SEQ ID NO: 28758 - protein, 9 aa, synthetic construct
  REGION 1..9: note = Description of Artificial Sequence: Synthetic peptide
QQDWSSPRT

SEQ ID NO: 28759 - protein, 249 aa, synthetic construct
  REGION 1..249: note = Description of Artificial Sequence: Synthetic polypeptide
EVQLVESGGGLVKPGGSLRLTCVASGFTFSNYWMNWVRQAPGKGLEWVAEIRLYSNNYATHYAESVKGRFTISRDDSKSTLYLQMNNLKTEDTGVYYCTRYYGNYGGYFDVWGRGTLVTVSSGKPGSGKPGSGKPGSGKPGSEIVLTQSPATLSVSPGERVTLTCRASQSVGNDVAWYQQKPGQAPRLLINYASHRYTSVPDRFTGSGYGTEFTLTISSVQSEDFAVYYCQQDWSSPRTFGGGTKVEIK

SEQ ID NO: 28760 - protein, 107 aa, synthetic construct; identical to SEQ ID NO: 2871
  REGION 1..107: note = Description of Artificial Sequence: Synthetic polypeptide
  REGION 1..107: note = VH of XENP19692

SEQ ID NO: 28761 - protein, 11 aa, synthetic construct
  REGION 1..11: note = Description of Artificial Sequence: Synthetic peptide
  REGION 1..11: note = XENP19692 vhCDR1
RASQSVGNDVA

SEQ ID NO: 28762 - protein, 7 aa, synthetic construct
  REGION 1..7: note = Description of Artificial Sequence: Synthetic peptide
  REGION 1..7: note = XENP19692 vhCDR2
YASHRYT

SEQ ID NO: 28763 - protein, 9 aa, synthetic construct
  REGION 1..9: note = Description of Artificial Sequence: Synthetic peptide
  REGION 1..9: note = XENP19692 vhCDR3
QQDFSSPRT

SEQ ID NO: 28764 - protein, 20 aa, synthetic construct
  REGION 1..20: note = Description of Artificial Sequence: Synthetic peptide
  REGION 1..20: note = XENP19692 scFv
GKPGSGKPGSGKPGSGKPGS

SEQ ID NO: 28765 - protein, 122 aa, synthetic construct; identical to SEQ ID NO: 2872
  REGION 1..122: note = Description of Artificial Sequence: Synthetic polypeptide
  REGION 1..122: note = VL of XENP19692

SEQ ID NO: 28766 - protein, 5 aa, synthetic construct
  REGION 1..5: note = Description of Artificial Sequence: Synthetic peptide
  REGION 1..5: note = XENP19692 vlCDR1
NYWMN

SEQ ID NO: 28767 - protein, 19 aa, synthetic construct
  REGION 1..19: note = Description of Artificial Sequence: Synthetic peptide
  REGION 1..19: note = XENP19692 vlCDR2
EIRLYSNNYATHYAESVKG

SEQ ID NO: 28768 - protein, 11 aa, synthetic construct
  REGION 1..11: note = Description of Artificial Sequence: Synthetic peptide
  REGION 1..11: note = XENP19692 vlCDR3
YYGNYGGYFDV

SEQ ID NO: 28769 - protein, 249 aa, synthetic construct; identical to SEQ ID NO: 16069
  REGION 1..249: note = Description of Artificial Sequence: Synthetic polypeptide
  REGION 1..249: note = XENP19692 scFv

SEQ ID NO: 28770 - protein, 107 aa, synthetic construct; identical to SEQ ID NO: 16035
  REGION 1..107: note = Description of Artificial Sequence: Synthetic polypeptide
  REGION 1..107: note = VH of XENP19669

SEQ ID NO: 28771 - protein, 11 aa, synthetic construct
  REGION 1..11: note = Description of Artificial Sequence: Synthetic peptide
  REGION 1..11: note = XENP19669 vhCDR1
RASQSVGNDVA

SEQ ID NO: 28772 - protein, 7 aa, synthetic construct
  REGION 1..7: note = Description of Artificial Sequence: Synthetic peptide
  REGION 1..7: note = XENP19669 vhCDR2
YASHRYT

SEQ ID NO: 28773 - protein, 9 aa, synthetic construct
  REGION 1..9: note = Description of Artificial Sequence: Synthetic peptide
  REGION 1..9: note = XENP19669 vhCDR3
QQDFSSPRT

SEQ ID NO: 28774 - protein, 20 aa, synthetic construct
  REGION 1..20: note = Description of Artificial Sequence: Synthetic peptide
  REGION 1..20: note = XENP19669 scFv
GKPGSGKPGSGKPGSGKPGS

SEQ ID NO: 28775 - protein, 122 aa, synthetic construct; identical to SEQ ID NO: 16034
  REGION 1..122: note = Description of Artificial Sequence: Synthetic polypeptide
  REGION 1..122: note = VL of XENP19669

SEQ ID NO: 28776 - protein, 5 aa, synthetic construct
  REGION 1..5: note = Description of Artificial Sequence: Synthetic peptide
  REGION 1..5: note = XENP19669 vlCDR1
NYWMN

SEQ ID NO: 28777 - protein, 19 aa, synthetic construct
  REGION 1..19: note = Description of Artificial Sequence: Synthetic peptide
  REGION 1..19: note = XENP19669 vlCDR2
EIRLYSNNYATHYAESVKG

SEQ ID NO: 28778 - protein, 11 aa, synthetic construct
  REGION 1..11: note = Description of Artificial Sequence: Synthetic peptide
  REGION 1..11: note = XENP19669 vlCDR3
YYGNYGGYFDV

SEQ ID NO: 28779 - protein, 249 aa, synthetic construct; identical to SEQ ID NO: 16042
  REGION 1..249: note = Description of Artificial Sequence: Synthetic polypeptide
  REGION 1..249: note = XENP19669 scFv

SEQ ID NO: 28780 - protein, 120 aa, synthetic construct; identical to SEQ ID NO: 3091
  REGION 1..120: note = Description of Artificial Sequence: Synthetic polypeptide
  REGION 1..120: note = VH of XENP20162

SEQ ID NO: 28781 - protein, 5 aa, synthetic construct
  REGION 1..5: note = Description of Artificial Sequence: Synthetic peptide
  REGION 1..5: note = XENP20162 vhCDR1
NYWLG

SEQ ID NO: 28782 - protein, 17 aa, synthetic construct
  REGION 1..17: note = Description of Artificial Sequence: Synthetic peptide
  REGION 1..17: note = XENP20162 vhCDR2
NFYPGSSNTYYNEKFQG

SEQ ID NO: 28783 - protein, 11 aa, synthetic construct
  REGION 1..11: note = Description of Artificial Sequence: Synthetic peptide
  REGION 1..11: note = XENP20162 vhCDR3
HYGTNYRYFDV

SEQ ID NO: 28784 - protein, 20 aa, synthetic construct
  REGION 1..20: note = Description of Artificial Sequence: Synthetic peptide
  REGION 1..20: note = XENP20162 scFv
GKPGSGKPGSGKPGSGKPGS

SEQ ID NO: 28785 - protein, 107 aa, synthetic construct; identical to SEQ ID NO: 3092
  REGION 1..107: note = Description of Artificial Sequence: Synthetic polypeptide
  REGION 1..107: note = VL of XENP20162

SEQ ID NO: 28786 - protein, 11 aa, synthetic construct
  REGION 1..11: note = Description of Artificial Sequence: Synthetic peptide
  REGION 1..11: note = XENP20162 vlCDR1
RASQSVSNDVA

SEQ ID NO: 28787 - protein, 7 aa, synthetic construct
  REGION 1..7: note = Description of Artificial Sequence: Synthetic peptide
  REGION 1..7: note = XENP20162 vlCDR2
YASNRYT

SEQ ID NO: 28788 - protein, 9 aa, synthetic construct
  REGION 1..9: note = Description of Artificial Sequence: Synthetic peptide
  REGION 1..9: note = XENP20162 vlCDR3
QQDYSSPYT

SEQ ID NO: 28789 - protein, 247 aa, synthetic construct; identical to SEQ ID NO: 16087
  REGION 1..247: note = Description of Artificial Sequence: Synthetic polypeptide
  REGION 1..247: note = XENP20162 scFv

SEQ ID NO: 28790 - protein, 118 aa, synthetic construct; identical to SEQ ID NO: 5085
  REGION 1..118: note = Description of Artificial Sequence: Synthetic polypeptide
  REGION 1..118: note = VH of XENP19235 Fab, XENP19769 scFv

SEQ ID NO: 28791 - protein, 5 aa, synthetic construct
  REGION 1..5: note = Description of Artificial Sequence: Synthetic peptide
  REGION 1..5: note = XENP19235 Fab, XENP19769 scFv vhCDR1
SYAMH

SEQ ID NO: 28792 - protein, 17 aa, synthetic construct
  REGION 1..17: note = Description of Artificial Sequence: Synthetic peptide
  REGION 1..17: note = XENP19235 Fab, XENP19769 scFv vhCDR2
FISYDGNNKYYADSVKG

SEQ ID NO: 28793 - protein, 9 aa, synthetic construct
  REGION 1..9: note = Description of Artificial Sequence: Synthetic peptide
  REGION 1..9: note = XENP19235 Fab, XENP19769 scFv vhCDR3
TGWLGPFDY

SEQ ID NO: 28794 - protein, 20 aa, synthetic construct
  REGION 1..20: note = Description of Artificial Sequence: Synthetic peptide
  REGION 1..20: note = XENP19235 Fab, XENP19769 scFv scFv linker
GKPGSGKPGSGKPGSGKPGS

SEQ ID NO: 28795 - protein, 108 aa, synthetic construct; identical to SEQ ID NO: 3741
  REGION 1..108: note = Description of Artificial Sequence: Synthetic polypeptide
  REGION 1..108: note = VL of XENP19235 Fab, XENP19769 scFv

SEQ ID NO: 28796 - protein, 12 aa, synthetic construct
  REGION 1..12: note = Description of Artificial Sequence: Synthetic peptide
  REGION 1..12: note = XENP19235 Fab, XENP19769 scFv vlCDR1
RASQSVGSSYLA

SEQ ID NO: 28797 - protein, 7 aa, synthetic construct
  REGION 1..7: note = Description of Artificial Sequence: Synthetic peptide
  REGION 1..7: note = XENP19235 Fab, XENP19769 scFv vlCDR2
GAFSRAT

SEQ ID NO: 28798 - protein, 9 aa, synthetic construct
  REGION 1..9: note = Description of Artificial Sequence: Synthetic peptide
  REGION 1..9: note = XENP19235 Fab, XENP19769 scFv vlCDR3
QQYGSSPWT

SEQ ID NO: 28799 - protein, 246 aa, synthetic construct; identical to SEQ ID NO: 5084
  REGION 1..246: note = Description of Artificial Sequence: Synthetic polypeptide
  REGION 1..246: note = XENP19235 Fab, XENP19769 scFv scFv

SEQ ID NO: 28800 - protein, 118 aa, synthetic construct; identical to SEQ ID NO: 5094
  REGION 1..118: note = Description of Artificial Sequence: Synthetic polypeptide
  REGION 1..118: note = VH of XENP19236 Fab, XENP19770 scFv

SEQ ID NO: 28801 - protein, 5 aa, synthetic construct
  REGION 1..5: note = Description of Artificial Sequence: Synthetic peptide
  REGION 1..5: note = XENP19236 Fab, XENP19770 scFv vhCDR1
SYGMH

SEQ ID NO: 28802 - protein, 17 aa, synthetic construct
  REGION 1..17: note = Description of Artificial Sequence: Synthetic peptide
  REGION 1..17: note = XENP19236 Fab, XENP19770 scFv vhCDR2
FISYDGNNKYYADSVKG

SEQ ID NO: 28803 - protein, 9 aa, synthetic construct
  REGION 1..9: note = Description of Artificial Sequence: Synthetic peptide
  REGION 1..9: note = XENP19236 Fab, XENP19770 scFv vhCDR3
TGWLGPFDY

SEQ ID NO: 28804 - protein, 20 aa, synthetic construct
  REGION 1..20: note = Description of Artificial Sequence: Synthetic peptide
  REGION 1..20: note = XENP19236 Fab, XENP19770 scFv scFv linker
GKPGSGKPGSGKPGSGKPGS

SEQ ID NO: 28805 - protein, 108 aa, synthetic construct; identical to SEQ ID NO: 3741
  REGION 1..108: note = Description of Artificial Sequence: Synthetic polypeptide
  REGION 1..108: note = VL of XENP19236 Fab, XENP19770 scFv

SEQ ID NO: 28806 - protein, 12 aa, synthetic construct
  REGION 1..12: note = Description of Artificial Sequence: Synthetic peptide
  REGION 1..12: note = XENP19236 Fab, XENP19770 scFv vlCDR1
RASQSVGSSYLA

SEQ ID NO: 28807 - protein, 7 aa, synthetic construct
  REGION 1..7: note = Description of Artificial Sequence: Synthetic peptide
  REGION 1..7: note = XENP19236 Fab, XENP19770 scFv vlCDR2
GAFSRAT

SEQ ID NO: 28808 - protein, 9 aa, synthetic construct
  REGION 1..9: note = Description of Artificial Sequence: Synthetic peptide
  REGION 1..9: note = XENP19236 Fab, XENP19770 scFv vlCDR3
QQYGSSPWT

SEQ ID NO: 28809 - protein, 246 aa, synthetic construct; identical to SEQ ID NO: 5093
  REGION 1..246: note = Description of Artificial Sequence: Synthetic polypeptide
  REGION 1..246: note = XENP19236 Fab, XENP19770 scFv scFv

SEQ ID NO: 28810 - protein, 118 aa, synthetic construct; identical to SEQ ID NO: 5103
  REGION 1..118: note = Description of Artificial Sequence: Synthetic polypeptide
  REGION 1..118: note = VH of XENP19237 Fab, XENP19771 scFv

SEQ ID NO: 28811 - protein, 5 aa, synthetic construct
  REGION 1..5: note = Description of Artificial Sequence: Synthetic peptide
  REGION 1..5: note = XENP19237 Fab, XENP19771 scFv vhCDR1
SYSMH

SEQ ID NO: 28812 - protein, 17 aa, synthetic construct
  REGION 1..17: note = Description of Artificial Sequence: Synthetic peptide
  REGION 1..17: note = XENP19237 Fab, XENP19771 scFv vhCDR2
FISYDGNNKYYADSVKG

SEQ ID NO: 28813 - protein, 9 aa, synthetic construct
  REGION 1..9: note = Description of Artificial Sequence: Synthetic peptide
  REGION 1..9: note = XENP19237 Fab, XENP19771 scFv vhCDR3
TGWLGPFDY

SEQ ID NO: 28814 - protein, 20 aa, synthetic construct
  REGION 1..20: note = Description of Artificial Sequence: Synthetic peptide
  REGION 1..20: note = XENP19237 Fab, XENP19771 scFv scFv linker
GKPGSGKPGSGKPGSGKPGS

SEQ ID NO: 28815 - protein, 108 aa, synthetic construct; identical to SEQ ID NO: 3741
  REGION 1..108: note = Description of Artificial Sequence: Synthetic polypeptide
  REGION 1..108: note = VL of XENP19237 Fab, XENP19771 scFv

SEQ ID NO: 28816 - protein, 12 aa, synthetic construct
  REGION 1..12: note = Description of Artificial Sequence: Synthetic peptide
  REGION 1..12: note = XENP19237 Fab, XENP19771 scFv vlCDR1
RASQSVGSSYLA

SEQ ID NO: 28817 - protein, 7 aa, synthetic construct
  REGION 1..7: note = Description of Artificial Sequence: Synthetic peptide
  REGION 1..7: note = XENP19237 Fab, XENP19771 scFv vlCDR2
GAFSRAT

SEQ ID NO: 28818 - protein, 9 aa, synthetic construct
  REGION 1..9: note = Description of Artificial Sequence: Synthetic peptide
  REGION 1..9: note = XENP19237 Fab, XENP19771 scFv vlCDR3
QQYGSSPWT

SEQ ID NO: 28819 - protein, 246 aa, synthetic construct; identical to SEQ ID NO: 5102
  REGION 1..246: note = Description of Artificial Sequence: Synthetic polypeptide
  REGION 1..246: note = XENP19237 Fab, XENP19771 scFv scFv

SEQ ID NO: 28820 - protein, 20 aa, synthetic construct
  REGION 1..20: note = Description of Artificial Sequence: Synthetic peptide
  REGION 1..20: note = Fab XENP19773, scFv XENP19239 scFv linker
GKPGSGKPGSGKPGSGKPGS

SEQ ID NO: 28821 - protein, 246 aa, synthetic construct; identical to SEQ ID NO: 5120
  REGION 1..246: note = Description of Artificial Sequence: Synthetic polypeptide
  REGION 1..246: note = Fab XENP19773, scFv XENP19239 scFv

SEQ ID NO: 28822 - protein, 118 aa, synthetic construct; identical to SEQ ID NO: 5202
  REGION 1..118: note = Description of Artificial Sequence: Synthetic polypeptide
  REGION 1..118: note = VH of Fab XENP19248, scFv XENP19782

SEQ ID NO: 28823 - protein, 5 aa, synthetic construct
  REGION 1..5: note = Description of Artificial Sequence: Synthetic peptide
  REGION 1..5: note = Fab XENP19248, scFv XENP19782 vhCDR1
SYTMH

SEQ ID NO: 28824 - protein, 17 aa, synthetic construct
  REGION 1..17: note = Description of Artificial Sequence: Synthetic peptide
  REGION 1..17: note = Fab XENP19248, scFv XENP19782 vhCDR2
FISYDGNNKYYADSVKG

SEQ ID NO: 28825 - protein, 9 aa, synthetic construct
  REGION 1..9: note = Description of Artificial Sequence: Synthetic peptide
  REGION 1..9: note = Fab XENP19248, scFv XENP19782 vhCDR3
TGWLGPFDY

SEQ ID NO: 28826 - protein, 20 aa, synthetic construct
  REGION 1..20: note = Description of Artificial Sequence: Synthetic peptide
  REGION 1..20: note = Fab XENP19248, scFv XENP19782 scFv linker
GKPGSGKPGSGKPGSGKPGS

SEQ ID NO: 28827 - protein, 108 aa, synthetic construct; identical to SEQ ID NO: 3741
  REGION 1..108: note = Description of Artificial Sequence: Synthetic polypeptide
  REGION 1..108: note = VL of Fab XENP19248, scFv XENP19782

SEQ ID NO: 28828 - protein, 12 aa, synthetic construct
  REGION 1..12: note = Description of Artificial Sequence: Synthetic peptide
  REGION 1..12: note = Fab XENP19248, scFv XENP19782 vlCDR1
RASQSVGSSYLA

SEQ ID NO: 28829 - protein, 7 aa, synthetic construct
  REGION 1..7: note = Description of Artificial Sequence: Synthetic peptide
  REGION 1..7: note = Fab XENP19248, scFv XENP19782 vlCDR2
GAFSRAT

SEQ ID NO: 28830 - protein, 9 aa, synthetic construct
  REGION 1..9: note = Description of Artificial Sequence: Synthetic peptide
  REGION 1..9: note = Fab XENP19248, scFv XENP19782 vlCDR3
QQYGSSPWT

SEQ ID NO: 28831 - protein, 246 aa, synthetic construct; identical to SEQ ID NO: 5201
  REGION 1..246: note = Description of Artificial Sequence: Synthetic polypeptide
  REGION 1..246: note = Fab XENP19248, scFv XENP19782 scFv

SEQ ID NO: 28832 - protein, 118 aa, synthetic construct; identical to SEQ ID NO: 5211
  REGION 1..118: note = Description of Artificial Sequence: Synthetic polypeptide
  REGION 1..118: note = VH of Fab XENP19249, scFv XENP19783

SEQ ID NO: 28833 - protein, 5 aa, synthetic construct
  REGION 1..5: note = Description of Artificial Sequence: Synthetic peptide
  REGION 1..5: note = Fab XENP19249, scFv XENP19783 vhCDR1
SYTMH

SEQ ID NO: 28834 - protein, 17 aa, synthetic construct
  REGION 1..17: note = Description of Artificial Sequence: Synthetic peptide
  REGION 1..17: note = Fab XENP19249, scFv XENP19783 vhCDR2
FISYDGNNKYYADSVKG

SEQ ID NO: 28835 - protein, 9 aa, synthetic construct
  REGION 1..9: note = Description of Artificial Sequence: Synthetic peptide
  REGION 1..9: note = Fab XENP19249, scFv XENP19783 vhCDR3
TGWLGPFDY

SEQ ID NO: 28836 - protein, 20 aa, synthetic construct
  REGION 1..20: note = Description of Artificial Sequence: Synthetic peptide
  REGION 1..20: note = Fab XENP19249, scFv XENP19783 scFv linker
GKPGSGKPGSGKPGSGKPGS

SEQ ID NO: 28837 - protein, 108 aa, synthetic construct; identical to SEQ ID NO: 3741
  REGION 1..108: note = Description of Artificial Sequence: Synthetic polypeptide
  REGION 1..108: note = VL of Fab XENP19249, scFv XENP19783

SEQ ID NO: 28838 - protein, 12 aa, synthetic construct
  REGION 1..12: note = Description of Artificial Sequence: Synthetic peptide
  REGION 1..12: note = Fab XENP19249, scFv XENP19783 vlCDR1
RASQSVGSSYLA

SEQ ID NO: 28839 - protein, 7 aa, synthetic construct
  REGION 1..7: note = Description of Artificial Sequence: Synthetic peptide
  REGION 1..7: note = Fab XENP19249, scFv XENP19783 vlCDR2
GAFSRAT

SEQ ID NO: 28840 - protein, 9 aa, synthetic construct
  REGION 1..9: note = Description of Artificial Sequence: Synthetic peptide
  REGION 1..9: note = Fab XENP19249, scFv XENP19783 vlCDR3
QQYGSSPWT

SEQ ID NO: 28841 - protein, 246 aa, synthetic construct; identical to SEQ ID NO: 5210
  REGION 1..246: note = Description of Artificial Sequence: Synthetic polypeptide
  REGION 1..246: note = Fab XENP19249, scFv XENP19783 scFv

SEQ ID NO: 28842 - protein, 118 aa, synthetic construct; identical to SEQ ID NO: 5220
  REGION 1..118: note = Description of Artificial Sequence: Synthetic polypeptide
  REGION 1..118: note = VH of Fab XENP19250, scFv XENP19784

SEQ ID NO: 28843 - protein, 5 aa, synthetic construct
  REGION 1..5: note = Description of Artificial Sequence: Synthetic peptide
  REGION 1..5: note = Fab XENP19250, scFv XENP19784 vhCDR1
SYTMH

SEQ ID NO: 28844 - protein, 17 aa, synthetic construct
  REGION 1..17: note = Description of Artificial Sequence: Synthetic peptide
  REGION 1..17: note = Fab XENP19250, scFv XENP19784 vhCDR2
FISYDGNNKYYADSVKG

SEQ ID NO: 28845 - protein, 9 aa, synthetic construct
  REGION 1..9: note = Description of Artificial Sequence: Synthetic peptide
  REGION 1..9: note = Fab XENP19250, scFv XENP19784 vhCDR3
TGWLGPFDY

SEQ ID NO: 28846 - protein, 20 aa, synthetic construct
  REGION 1..20: note = Description of Artificial Sequence: Synthetic peptide
  REGION 1..20: note = Fab XENP19250, scFv XENP19784 scFv linker
GKPGSGKPGSGKPGSGKPGS

SEQ ID NO: 28847 - protein, 108 aa, synthetic construct; identical to SEQ ID NO: 3741
  REGION 1..108: note = Description of Artificial Sequence: Synthetic polypeptide
  REGION 1..108: note = VL of Fab XENP19250, scFv XENP19784

SEQ ID NO: 28848 - protein, 12 aa, synthetic construct
  REGION 1..12: note = Description of Artificial Sequence: Synthetic peptide
  REGION 1..12: note = Fab XENP19250, scFv XENP19784 vlCDR1
RASQSVGSSYLA

SEQ ID NO: 28849 - protein, 7 aa, synthetic construct
  REGION 1..7: note = Description of Artificial Sequence: Synthetic peptide
  REGION 1..7: note = Fab XENP19250, scFv XENP19784 vlCDR2
GAFSRAT

SEQ ID NO: 28850 - protein, 9 aa, synthetic construct
  REGION 1..9: note = Description of Artificial Sequence: Synthetic peptide
  REGION 1..9: note = Fab XENP19250, scFv XENP19784 vlCDR3
QQYGSSPWT

SEQ ID NO: 28851 - protein, 246 aa, synthetic construct; identical to SEQ ID NO: 5219
  REGION 1..246: note = Description of Artificial Sequence: Synthetic polypeptide
  REGION 1..246: note = Fab XENP19250, scFv XENP19784 scFv

SEQ ID NO: 28852 - protein, 118 aa, synthetic construct; identical to SEQ ID NO: 5490
  REGION 1..118: note = Description of Artificial Sequence: Synthetic polypeptide
  REGION 1..118: note = VH of Fab XENP19280, scFv XENP19818

SEQ ID NO: 28853 - protein, 5 aa, synthetic construct
  REGION 1..5: note = Description of Artificial Sequence: Synthetic peptide
  REGION 1..5: note = Fab XENP19280, scFv XENP19818 vhCDR1
SYTMH

SEQ ID NO: 28854 - protein, 17 aa, synthetic construct
  REGION 1..17: note = Description of Artificial Sequence: Synthetic peptide
  REGION 1..17: note = Fab XENP19280, scFv XENP19818 vhCDR2
FISYDGSNKYYADSVKG

SEQ ID NO: 28855 - protein, 9 aa, synthetic construct
  REGION 1..9: note = Description of Artificial Sequence: Synthetic peptide
  REGION 1..9: note = Fab XENP19280, scFv XENP19818 vhCDR3
TGWLGPFDY

SEQ ID NO: 28856 - protein, 20 aa, synthetic construct
  REGION 1..20: note = Description of Artificial Sequence: Synthetic peptide
  REGION 1..20: note = Fab XENP19280, scFv XENP19818 scFv linker
GKPGSGKPGSGKPGSGKPGS

SEQ ID NO: 28857 - protein, 108 aa, synthetic construct; identical to SEQ ID NO: 3741
  REGION 1..108: note = Description of Artificial Sequence: Synthetic polypeptide
  REGION 1..108: note = VL of Fab XENP19280, scFv XENP19818

SEQ ID NO: 28858 - protein, 12 aa, synthetic construct
  REGION 1..12: note = Description of Artificial Sequence: Synthetic peptide
  REGION 1..12: note = Fab XENP19280, scFv XENP19818 vlCDR1
RASQSVGSSYLA

SEQ ID NO: 28859 - protein, 7 aa, synthetic construct
  REGION 1..7: note = Description of Artificial Sequence: Synthetic peptide
  REGION 1..7: note = Fab XENP19280, scFv XENP19818 vlCDR2
GAFSRAT

SEQ ID NO: 28860 - protein, 9 aa, synthetic construct
  REGION 1..9: note = Description of Artificial Sequence: Synthetic peptide
  REGION 1..9: note = Fab XENP19280, scFv XENP19818 vlCDR3
QQYGSSPWT

SEQ ID NO: 28861 - protein, 246 aa, synthetic construct; identical to SEQ ID NO: 5489
  REGION 1..246: note = Description of Artificial Sequence: Synthetic polypeptide
  REGION 1..246: note = Fab XENP19280, scFv XENP19818 scFv

SEQ ID NO: 28862 - protein, 118 aa, synthetic construct; identical to SEQ ID NO: 3737
  REGION 1..118: note = Description of Artificial Sequence: Synthetic polypeptide
  REGION 1..118: note = VH of Fab XENP19437, scFv XENP19910

SEQ ID NO: 28863 - protein, 5 aa, synthetic construct
  REGION 1..5: note = Description of Artificial Sequence: Synthetic peptide
  REGION 1..5: note = Fab XENP19437, scFv XENP19910 vhCDR1
SYTMH

SEQ ID NO: 28864 - protein, 17 aa, synthetic construct
  REGION 1..17: note = Description of Artificial Sequence: Synthetic peptide
  REGION 1..17: note = Fab XENP19437, scFv XENP19910 vhCDR2
FISYDGNNKYYADSVKG

SEQ ID NO: 28865 - protein, 9 aa, synthetic construct
  REGION 1..9: note = Description of Artificial Sequence: Synthetic peptide
  REGION 1..9: note = Fab XENP19437, scFv XENP19910 vhCDR3
TGWLGPFDY

SEQ ID NO: 28866 - protein, 20 aa, synthetic construct
  REGION 1..20: note = Description of Artificial Sequence: Synthetic peptide
  REGION 1..20: note = Fab XENP19437, scFv XENP19910 scFv linker
GKPGSGKPGSGKPGSGKPGS

SEQ ID NO: 28867 - protein, 108 aa, synthetic construct; identical to SEQ ID NO: 2411
  REGION 1..108: note = Description of Artificial Sequence: Synthetic polypeptide
  REGION 1..108: note = VL of Fab XENP19437, scFv XENP19910

SEQ ID NO: 28868 - protein, 12 aa, synthetic construct
  REGION 1..12: note = Description of Artificial Sequence: Synthetic peptide
  REGION 1..12: note = Fab XENP19437, scFv XENP19910 vlCDR1
RASQSVSSSYLA

SEQ ID NO: 28869 - protein, 7 aa, synthetic construct
  REGION 1..7: note = Description of Artificial Sequence: Synthetic peptide
  REGION 1..7: note = Fab XENP19437, scFv XENP19910 vlCDR2
GAFSRAT

SEQ ID NO: 28870 - protein, 9 aa, synthetic construct
  REGION 1..9: note = Description of Artificial Sequence: Synthetic peptide
  REGION 1..9: note = Fab XENP19437, scFv XENP19910 vlCDR3
QQYGSSPWT

SEQ ID NO: 28871 - protein, 246 aa, synthetic construct; identical to SEQ ID NO: 6281
  REGION 1..246: note = Description of Artificial Sequence: Synthetic polypeptide
  REGION 1..246: note = Fab XENP19437, scFv XENP19910 scFv

SEQ ID NO: 28872 - protein, 118 aa, synthetic construct; identical to SEQ ID NO: 4806
  REGION 1..118: note = Description of Artificial Sequence: Synthetic polypeptide
  REGION 1..118: note = VH of Fab XENP19545, scFv XENP19552

SEQ ID NO: 28873 - protein, 5 aa, synthetic construct
  REGION 1..5: note = Description of Artificial Sequence: Synthetic peptide
  REGION 1..5: note = Fab XENP19545, scFv XENP19552 vhCDR1
SYTMH

SEQ ID NO: 28874 - protein, 17 aa, synthetic construct
  REGION 1..17: note = Description of Artificial Sequence: Synthetic peptide
  REGION 1..17: note = Fab XENP19545, scFv XENP19552 vhCDR2
FISYDGNNKYYPGSVKG

SEQ ID NO: 28875 - protein, 9 aa, synthetic construct
  REGION 1..9: note = Description of Artificial Sequence: Synthetic peptide
  REGION 1..9: note = Fab XENP19545, scFv XENP19552 vhCDR3
TGWLGPFDY

SEQ ID NO: 28876 - protein, 20 aa, synthetic construct
  REGION 1..20: note = Description of Artificial Sequence: Synthetic peptide
  REGION 1..20: note = Fab XENP19545, scFv XENP19552 scFv linker
GKPGSGKPGSGKPGSGKPGS

SEQ ID NO: 28877 - protein, 108 aa, synthetic construct; identical to SEQ ID NO: 3741
  REGION 1..108: note = Description of Artificial Sequence: Synthetic polypeptide
  REGION 1..108: note = VL of Fab XENP19545, scFv XENP19552

SEQ ID NO: 28878 - protein, 12 aa, synthetic construct
  REGION 1..12: note = Description of Artificial Sequence: Synthetic peptide
  REGION 1..12: note = Fab XENP19545, scFv XENP19552 vlCDR1
RASQSVGSSYLA

SEQ ID NO: 28879 - protein, 7 aa, synthetic construct
  REGION 1..7: note = Description of Artificial Sequence: Synthetic peptide
  REGION 1..7: note = Fab XENP19545, scFv XENP19552 vlCDR2
GAFSRAT

SEQ ID NO: 28880 - protein, 9 aa, synthetic construct
  REGION 1..9: note = Description of Artificial Sequence: Synthetic peptide
  REGION 1..9: note = Fab XENP19545, scFv XENP19552 vlCDR3
QQYGSSPWT

SEQ ID NO: 28881 - protein, 246 aa, synthetic construct; identical to SEQ ID NO: 4805
  REGION 1..246: note = Description of Artificial Sequence: Synthetic polypeptide
  REGION 1..246: note = Fab XENP19545, scFv XENP19552 scFv

SEQ ID NO: 28882 - protein, 118 aa, synthetic construct; identical to SEQ ID NO: 7290
  REGION 1..118: note = Description of Artificial Sequence: Synthetic polypeptide
  REGION 1..118: note = VH of Fab XENP20422, scFv XENP20431

SEQ ID NO: 28883 - protein, 5 aa, synthetic construct
  REGION 1..5: note = Description of Artificial Sequence: Synthetic peptide
  REGION 1..5: note = Fab XENP20422, scFv XENP20431 vhCDR1
SYTMH

SEQ ID NO: 28884 - protein, 17 aa, synthetic construct
  REGION 1..17: note = Description of Artificial Sequence: Synthetic peptide
  REGION 1..17: note = Fab XENP20422, scFv XENP20431 vhCDR2
FISYDGNTKYYADSVKG

SEQ ID NO: 28885 - protein, 9 aa, synthetic construct
  REGION 1..9: note = Description of Artificial Sequence: Synthetic peptide
  REGION 1..9: note = Fab XENP20422, scFv XENP20431 vhCDR3
GGLLGPFDL

SEQ ID NO: 28886 - protein, 20 aa, synthetic construct
  REGION 1..20: note = Description of Artificial Sequence: Synthetic peptide
  REGION 1..20: note = Fab XENP20422, scFv XENP20431 scFv linker
GKPGSGKPGSGKPGSGKPGS

SEQ ID NO: 28887 - protein, 108 aa, synthetic construct; identical to SEQ ID NO: 7399
  REGION 1..108: note = Description of Artificial Sequence: Synthetic polypeptide
  REGION 1..108: note = VL of Fab XENP20422, scFv XENP20431

SEQ ID NO: 28888 - protein, 12 aa, synthetic construct
  REGION 1..12: note = Description of Artificial Sequence: Synthetic peptide
  REGION 1..12: note = Fab XENP20422, scFv XENP20431 vlCDR1
RASQSVGSSYLA

SEQ ID NO: 28889 - protein, 7 aa, synthetic construct
  REGION 1..7: note = Description of Artificial Sequence: Synthetic peptide
  REGION 1..7: note = Fab XENP20422, scFv XENP20431 vlCDR2
GASSRAT

SEQ ID NO: 28890 - protein, 9 aa, synthetic construct
  REGION 1..9: note = Description of Artificial Sequence: Synthetic peptide
  REGION 1..9: note = Fab XENP20422, scFv XENP20431 vlCDR3
QQYGSSPWT

SEQ ID NO: 28891 - protein, 246 aa, synthetic construct; identical to SEQ ID NO: 7514
  REGION 1..246: note = Description of Artificial Sequence: Synthetic polypeptide
  REGION 1..246: note = Fab XENP20422, scFv XENP20431 scFv

SEQ ID NO: 28892 - protein, 118 aa, synthetic construct; identical to SEQ ID NO: 7290
  REGION 1..118: note = Description of Artificial Sequence: Synthetic polypeptide
  REGION 1..118: note = VH of Fab XENP20423, scFv XENP20432

SEQ ID NO: 28893 - protein, 5 aa, synthetic construct
  REGION 1..5: note = Description of Artificial Sequence: Synthetic peptide
  REGION 1..5: note = Fab XENP20423, scFv XENP20432 vhCDR1
SYTMH

SEQ ID NO: 28894 - protein, 17 aa, synthetic construct
  REGION 1..17: note = Description of Artificial Sequence: Synthetic peptide
  REGION 1..17: note = Fab XENP20423, scFv XENP20432 vhCDR2
FISYDGNTKYYADSVKG

SEQ ID NO: 28895 - protein, 9 aa, synthetic construct
  REGION 1..9: note = Description of Artificial Sequence: Synthetic peptide
  REGION 1..9: note = Fab XENP20423, scFv XENP20432 vhCDR3
GGLLGPFDL

SEQ ID NO: 28896 - protein, 20 aa, synthetic construct
  REGION 1..20: note = Description of Artificial Sequence: Synthetic peptide
  REGION 1..20: note = Fab XENP20423, scFv XENP20432 scFv linker
GKPGSGKPGSGKPGSGKPGS

SEQ ID NO: 28897 - protein, 108 aa, synthetic construct; identical to SEQ ID NO: 2396
  REGION 1..108: note = Description of Artificial Sequence: Synthetic polypeptide
  REGION 1..108: note = VL of Fab XENP20423, scFv XENP20432

SEQ ID NO: 28898 - protein, 12 aa, synthetic construct
  REGION 1..12: note = Description of Artificial Sequence: Synthetic peptide
  REGION 1..12: note = Fab XENP20423, scFv XENP20432 vlCDR1
RASQSVGSSYLA

SEQ ID NO: 28899 - protein, 7 aa, synthetic construct
  REGION 1..7: note = Description of Artificial Sequence: Synthetic peptide
  REGION 1..7: note = Fab XENP20423, scFv XENP20432 vlCDR2
GASSRAT

SEQ ID NO: 28900 - protein, 9 aa, synthetic construct
  REGION 1..9: note = Description of Artificial Sequence: Synthetic peptide
  REGION 1..9: note = Fab XENP20423, scFv XENP20432 vlCDR3
QQYGSSPWT

SEQ ID NO: 28901 - protein, 246 aa, synthetic construct; identical to SEQ ID NO: 7523
  REGION 1..246: note = Description of Artificial Sequence: Synthetic polypeptide
  REGION 1..246: note = Fab XENP20423, scFv XENP20432 scFv

SEQ ID NO: 28902 - protein, 118 aa, synthetic construct; identical to SEQ ID NO: 7290
  REGION 1..118: note = Description of Artificial Sequence: Synthetic polypeptide
  REGION 1..118: note = VH of Fab XENP20424, scFv XENP20433

SEQ ID NO: 28903 - protein, 5 aa, synthetic construct
  REGION 1..5: note = Description of Artificial Sequence: Synthetic peptide
  REGION 1..5: note = Fab XENP20424, scFv XENP20433 vhCDR1
SYTMH

SEQ ID NO: 28904 - protein, 17 aa, synthetic construct
  REGION 1..17: note = Description of Artificial Sequence: Synthetic peptide
  REGION 1..17: note = Fab XENP20424, scFv XENP20433 vhCDR2
FISYDGNTKYYADSVKG

SEQ ID NO: 28905 - protein, 9 aa, synthetic construct
  REGION 1..9: note = Description of Artificial Sequence: Synthetic peptide
  REGION 1..9: note = Fab XENP20424, scFv XENP20433 vhCDR3
GGLLGPFDL

SEQ ID NO: 28906 - protein, 20 aa, synthetic construct
  REGION 1..20: note = Description of Artificial Sequence: Synthetic peptide
  REGION 1..20: note = Fab XENP20424, scFv XENP20433 scFv linker
GKPGSGKPGSGKPGSGKPGS

SEQ ID NO: 28907 - protein, 108 aa, synthetic construct; identical to SEQ ID NO: 7471
  REGION 1..108: note = Description of Artificial Sequence: Synthetic polypeptide
  REGION 1..108: note = VL of Fab XENP20424, scFv XENP20433

SEQ ID NO: 28908 - protein, 12 aa, synthetic construct
  REGION 1..12: note = Description of Artificial Sequence: Synthetic peptide
  REGION 1..12: note = Fab XENP20424, scFv XENP20433 vlCDR1
RASQSVSSSYLA

SEQ ID NO: 28909 - protein, 7 aa, synthetic construct
  REGION 1..7: note = Description of Artificial Sequence: Synthetic peptide
  REGION 1..7: note = Fab XENP20424, scFv XENP20433 vlCDR2
GASSRAT

SEQ ID NO: 28910 - protein, 9 aa, synthetic construct
  REGION 1..9: note = Description of Artificial Sequence: Synthetic peptide
  REGION 1..9: note = Fab XENP20424, scFv XENP20433 vlCDR3
QQYGSSPWT

SEQ ID NO: 28911 - protein, 246 aa, synthetic construct; identical to SEQ ID NO: 7532
  REGION 1..246: note = Description of Artificial Sequence: Synthetic polypeptide
  REGION 1..246: note = Fab XENP20424, scFv XENP20433 scFv

SEQ ID NO: 28912 - protein, 118 aa, synthetic construct; identical to SEQ ID NO: 2395
  REGION 1..118: note = Description of Artificial Sequence: Synthetic polypeptide
  REGION 1..118: note = VH of Fab XENP20425, scFv XENP20434

SEQ ID NO: 28913 - protein, 5 aa, synthetic construct
  REGION 1..5: note = Description of Artificial Sequence: Synthetic peptide
  REGION 1..5: note = Fab XENP20425, scFv XENP20434 vhCDR1
SYTMH

SEQ ID NO: 28914 - protein, 17 aa, synthetic construct
  REGION 1..17: note = Description of Artificial Sequence: Synthetic peptide
  REGION 1..17: note = Fab XENP20425, scFv XENP20434 vhCDR2
FISYDGNYKYYADSVKG

SEQ ID NO: 28915 - protein, 9 aa, synthetic construct
  REGION 1..9: note = Description of Artificial Sequence: Synthetic peptide
  REGION 1..9: note = Fab XENP20425, scFv XENP20434 vhCDR3
GGHLGPFDL

SEQ ID NO: 28916 - protein, 20 aa, synthetic construct
  REGION 1..20: note = Description of Artificial Sequence: Synthetic peptide
  REGION 1..20: note = Fab XENP20425, scFv XENP20434 scFv linker
GKPGSGKPGSGKPGSGKPGS

SEQ ID NO: 28917 - protein, 108 aa, synthetic construct; identical to SEQ ID NO: 7399
  REGION 1..108: note = Description of Artificial Sequence: Synthetic polypeptide
  REGION 1..108: note = VL of Fab XENP20425, scFv XENP20434

SEQ ID NO: 28918 - protein, 12 aa, synthetic construct
  REGION 1..12: note = Description of Artificial Sequence: Synthetic peptide
  REGION 1..12: note = Fab XENP20425, scFv XENP20434 vlCDR1
RASQSVGSSYLA

SEQ ID NO: 28919 - protein, 7 aa, synthetic construct
  REGION 1..7: note = Description of Artificial Sequence: Synthetic peptide
  REGION 1..7: note = Fab XENP20425, scFv XENP20434 vlCDR2
GASSRAT

SEQ ID NO: 28920 - protein, 9 aa, synthetic construct
  REGION 1..9: note = Description of Artificial Sequence: Synthetic peptide
  REGION 1..9: note = Fab XENP20425, scFv XENP20434 vlCDR3
QQYGSSPWT

SEQ ID NO: 28921 - protein, 246 aa, synthetic construct; identical to SEQ ID NO: 7541
  REGION 1..246: note = Description of Artificial Sequence: Synthetic polypeptide
  REGION 1..246: note = Fab XENP20425, scFv XENP20434 scFv

SEQ ID NO: 28922 - protein, 118 aa, synthetic construct; identical to SEQ ID NO: 2395
  REGION 1..118: note = Description of Artificial Sequence: Synthetic polypeptide
  REGION 1..118: note = VH of Fab XENP20426, scFv XENP20435

SEQ ID NO: 28923 - protein, 5 aa, synthetic construct
  REGION 1..5: note = Description of Artificial Sequence: Synthetic peptide
  REGION 1..5: note = Fab XENP20426, scFv XENP20435 vhCDR1
SYTMH

SEQ ID NO: 28924 - protein, 17 aa, synthetic construct
  REGION 1..17: note = Description of Artificial Sequence: Synthetic peptide
  REGION 1..17: note = Fab XENP20426, scFv XENP20435 vhCDR2
FISYDGNYKYYADSVKG

SEQ ID NO: 28925 - protein, 9 aa, synthetic construct
  REGION 1..9: note = Description of Artificial Sequence: Synthetic peptide
  REGION 1..9: note = Fab XENP20426, scFv XENP20435 vhCDR3
GGHLGPFDL

SEQ ID NO: 28926 - protein, 20 aa, synthetic construct
  REGION 1..20: note = Description of Artificial Sequence: Synthetic peptide
  REGION 1..20: note = Fab XENP20426, scFv XENP20435 scFv linker
GKPGSGKPGSGKPGSGKPGS

SEQ ID NO: 28927 - protein, 108 aa, synthetic construct; identical to SEQ ID NO: 2396
  REGION 1..108: note = Description of Artificial Sequence: Synthetic polypeptide
  REGION 1..108: note = VL of Fab XENP20426, scFv XENP20435

SEQ ID NO: 28928 - protein, 12 aa, synthetic construct
  REGION 1..12: note = Description of Artificial Sequence: Synthetic peptide
  REGION 1..12: note = Fab XENP20426, scFv XENP20435 vlCDR1
RASQSVGSSYLA

SEQ ID NO: 28929 - protein, 7 aa, synthetic construct
  REGION 1..7: note = Description of Artificial Sequence: Synthetic peptide
  REGION 1..7: note = Fab XENP20426, scFv XENP20435 vlCDR2
GASSRAT

SEQ ID NO: 28930 - protein, 9 aa, synthetic construct
  REGION 1..9: note = Description of Artificial Sequence: Synthetic peptide
  REGION 1..9: note = Fab XENP20426, scFv XENP20435 vlCDR3
QQYGSSPWT

SEQ ID NO: 28931 - protein, 246 aa, synthetic construct; identical to SEQ ID NO: 7550
  REGION 1..246: note = Description of Artificial Sequence: Synthetic polypeptide
  REGION 1..246: note = Fab XENP20426, scFv XENP20435 scFv

SEQ ID NO: 28932 - protein, 118 aa, synthetic construct; identical to SEQ ID NO: 2395
  REGION 1..118: note = Description of Artificial Sequence: Synthetic polypeptide
  REGION 1..118: note = VH of Fab XENP20427, scFv XENP20436

SEQ ID NO: 28933 - protein, 5 aa, synthetic construct
  REGION 1..5: note = Description of Artificial Sequence: Synthetic peptide
  REGION 1..5: note = Fab XENP20427, scFv XENP20436 vhCDR1
SYTMH

SEQ ID NO: 28934 - protein, 17 aa, synthetic construct
  REGION 1..17: note = Description of Artificial Sequence: Synthetic peptide
  REGION 1..17: note = Fab XENP20427, scFv XENP20436 vhCDR2
FISYDGNYKYYADSVKG

SEQ ID NO: 28935 - protein, 9 aa, synthetic construct
  REGION 1..9: note = Description of Artificial Sequence: Synthetic peptide
  REGION 1..9: note = Fab XENP20427, scFv XENP20436 vhCDR3
GGHLGPFDL

SEQ ID NO: 28936 - protein, 20 aa, synthetic construct
  REGION 1..20: note = Description of Artificial Sequence: Synthetic peptide
  REGION 1..20: note = Fab XENP20427, scFv XENP20436 scFv linker
GKPGSGKPGSGKPGSGKPGS

SEQ ID NO: 28937 - protein, 108 aa, synthetic construct; identical to SEQ ID NO: 7471
  REGION 1..108: note = Description of Artificial Sequence: Synthetic polypeptide
  REGION 1..108: note = VL of Fab XENP20427, scFv XENP20436

SEQ ID NO: 28938 - protein, 12 aa, synthetic construct
  REGION 1..12: note = Description of Artificial Sequence: Synthetic peptide
  REGION 1..12: note = Fab XENP20427, scFv XENP20436 vlCDR1
RASQSVSSSYLA

SEQ ID NO: 28939 - protein, 7 aa, synthetic construct
  REGION 1..7: note = Description of Artificial Sequence: Synthetic peptide
  REGION 1..7: note = Fab XENP20427, scFv XENP20436 vlCDR2
GASSRAT

SEQ ID NO: 28940 - protein, 9 aa, synthetic construct
  REGION 1..9: note = Description of Artificial Sequence: Synthetic peptide
  REGION 1..9: note = Fab XENP20427, scFv XENP20436 vlCDR3
QQYGSSPWT

SEQ ID NO: 28941 - protein, 246 aa, synthetic construct; identical to SEQ ID NO: 7559
  REGION 1..246: note = Description of Artificial Sequence: Synthetic polypeptide
  REGION 1..246: note = Fab XENP20427, scFv XENP20436 scFv

SEQ ID NO: 28942 - protein, 118 aa, synthetic construct; identical to SEQ ID NO: 7326
  REGION 1..118: note = Description of Artificial Sequence: Synthetic polypeptide
  REGION 1..118: note = VH of Fab XENP20428, scFv XENP20437

SEQ ID NO: 28943 - protein, 5 aa, synthetic construct
  REGION 1..5: note = Description of Artificial Sequence: Synthetic peptide
  REGION 1..5: note = Fab XENP20428, scFv XENP20437 vhCDR1
SYTMH

SEQ ID NO: 28944 - protein, 17 aa, synthetic construct
  REGION 1..17: note = Description of Artificial Sequence: Synthetic peptide
  REGION 1..17: note = Fab XENP20428, scFv XENP20437 vhCDR2
FISYDGNYKYYADSVKG

SEQ ID NO: 28945 - protein, 9 aa, synthetic construct
  REGION 1..9: note = Description of Artificial Sequence: Synthetic peptide
  REGION 1..9: note = Fab XENP20428, scFv XENP20437 vhCDR3
GGLLGPFDL

SEQ ID NO: 28946 - protein, 20 aa, synthetic construct
  REGION 1..20: note = Description of Artificial Sequence: Synthetic peptide
  REGION 1..20: note = Fab XENP20428, scFv XENP20437 scFv linker
GKPGSGKPGSGKPGSGKPGS

SEQ ID NO: 28947 - protein, 108 aa, synthetic construct; identical to SEQ ID NO: 7399
  REGION 1..108: note = Description of Artificial Sequence: Synthetic polypeptide
  REGION 1..108: note = VL of Fab XENP20428, scFv XENP20437

SEQ ID NO: 28948 - protein, 12 aa, synthetic construct
  REGION 1..12: note = Description of Artificial Sequence: Synthetic peptide
  REGION 1..12: note = Fab XENP20428, scFv XENP20437 vlCDR1
RASQSVGSSYLA

SEQ ID NO: 28949 - protein, 7 aa, synthetic construct
  REGION 1..7: note = Description of Artificial Sequence: Synthetic peptide
  REGION 1..7: note = Fab XENP20428, scFv XENP20437 vlCDR2
GASSRAT

SEQ ID NO: 28950 - protein, 9 aa, synthetic construct
  REGION 1..9: note = Description of Artificial Sequence: Synthetic peptide
  REGION 1..9: note = Fab XENP20428, scFv XENP20437 vlCDR3
QQYGSSPWT

SEQ ID NO: 28951 - protein, 246 aa, synthetic construct; identical to SEQ ID NO: 7568
  REGION 1..246: note = Description of Artificial Sequence: Synthetic polypeptide
  REGION 1..246: note = Fab XENP20428, scFv XENP20437 scFv

SEQ ID NO: 28952 - protein, 118 aa, synthetic construct; identical to SEQ ID NO: 7326
  REGION 1..118: note = Description of Artificial Sequence: Synthetic polypeptide
  REGION 1..118: note = VH of Fab XENP20429, scFv XENP20438

SEQ ID NO: 28953 - protein, 5 aa, synthetic construct
  REGION 1..5: note = Description of Artificial Sequence: Synthetic peptide
  REGION 1..5: note = Fab XENP20429, scFv XENP20438 vhCDR1
SYTMH

SEQ ID NO: 28954 - protein, 17 aa, synthetic construct
  REGION 1..17: note = Description of Artificial Sequence: Synthetic peptide
  REGION 1..17: note = Fab XENP20429, scFv XENP20438 vhCDR2
FISYDGNYKYYADSVKG

SEQ ID NO: 28955 - protein, 9 aa, synthetic construct
  REGION 1..9: note = Description of Artificial Sequence: Synthetic peptide
  REGION 1..9: note = Fab XENP20429, scFv XENP20438 vhCDR3
GGLLGPFDL

SEQ ID NO: 28956 - protein, 20 aa, synthetic construct
  REGION 1..20: note = Description of Artificial Sequence: Synthetic peptide
  REGION 1..20: note = Fab XENP20429, scFv XENP20438 scFv linker
GKPGSGKPGSGKPGSGKPGS

SEQ ID NO: 28957 - protein, 108 aa, synthetic construct; identical to SEQ ID NO: 2396
  REGION 1..108: note = Description of Artificial Sequence: Synthetic polypeptide
  REGION 1..108: note = VL of Fab XENP20429, scFv XENP20438

SEQ ID NO: 28958 - protein, 12 aa, synthetic construct
  REGION 1..12: note = Description of Artificial Sequence: Synthetic peptide
  REGION 1..12: note = Fab XENP20429, scFv XENP20438 vlCDR1
RASQSVGSSYLA

SEQ ID NO: 28959 - protein, 7 aa, synthetic construct
  REGION 1..7: note = Description of Artificial Sequence: Synthetic peptide
  REGION 1..7: note = Fab XENP20429, scFv XENP20438 vlCDR2
GASSRAT

SEQ ID NO: 28960 - protein, 9 aa, synthetic construct
  REGION 1..9: note = Description of Artificial Sequence: Synthetic peptide
  REGION 1..9: note = Fab XENP20429, scFv XENP20438 vlCDR3
QQYGSSPWT

SEQ ID NO: 28961 - protein, 246 aa, synthetic construct; identical to SEQ ID NO: 7577
  REGION 1..246: note = Description of Artificial Sequence: Synthetic polypeptide
  REGION 1..246: note = Fab XENP20429, scFv XENP20438 scFv

SEQ ID NO: 28962 - protein, 118 aa, synthetic construct; identical to SEQ ID NO: 7326
  REGION 1..118: note = Description of Artificial Sequence: Synthetic polypeptide
  REGION 1..118: note = VH of Fab XENP20430, scFv XENP20439

SEQ ID NO: 28963 - protein, 5 aa, synthetic construct
  REGION 1..5: note = Description of Artificial Sequence: Synthetic peptide
  REGION 1..5: note = Fab XENP20430, scFv XENP20439 vhCDR1
SYTMH

SEQ ID NO: 28964 - protein, 17 aa, synthetic construct
  REGION 1..17: note = Description of Artificial Sequence: Synthetic peptide
  REGION 1..17: note = Fab XENP20430, scFv XENP20439 vhCDR2
FISYDGNYKYYADSVKG

SEQ ID NO: 28965 - protein, 9 aa, synthetic construct
  REGION 1..9: note = Description of Artificial Sequence: Synthetic peptide
  REGION 1..9: note = Fab XENP20430, scFv XENP20439 vhCDR3
GGLLGPFDL

SEQ ID NO: 28966 - protein, 20 aa, synthetic construct
  REGION 1..20: note = Description of Artificial Sequence: Synthetic peptide
  REGION 1..20: note = Fab XENP20430, scFv XENP20439 scFv linker
GKPGSGKPGSGKPGSGKPGS

SEQ ID NO: 28967 - protein, 108 aa, synthetic construct; identical to SEQ ID NO: 7471
  REGION 1..108: note = Description of Artificial Sequence: Synthetic polypeptide
  REGION 1..108: note = VL of Fab XENP20430, scFv XENP20439

SEQ ID NO: 28968 - protein, 12 aa, synthetic construct
  REGION 1..12: note = Description of Artificial Sequence: Synthetic peptide
  REGION 1..12: note = Fab XENP20430, scFv XENP20439 vlCDR1
RASQSVSSSYLA

SEQ ID NO: 28969 - protein, 7 aa, synthetic construct
  REGION 1..7: note = Description of Artificial Sequence: Synthetic peptide
  REGION 1..7: note = Fab XENP20430, scFv XENP20439 vlCDR2
GASSRAT

SEQ ID NO: 28970 - protein, 9 aa, synthetic construct
  REGION 1..9: note = Description of Artificial Sequence: Synthetic peptide
  REGION 1..9: note = Fab XENP20430, scFv XENP20439 vlCDR3
QQYGSSPWT

SEQ ID NO: 28971 - protein, 246 aa, synthetic construct; identical to SEQ ID NO: 7586
  REGION 1..246: note = Description of Artificial Sequence: Synthetic polypeptide
  REGION 1..246: note = Fab XENP20430, scFv XENP20439 scFv

SEQ ID NO: 28972 - protein, 118 aa, synthetic construct; identical to SEQ ID NO: 7137
  REGION 1..118: note = Description of Artificial Sequence: Synthetic polypeptide
  REGION 1..118: note = VH of Fab XENP20341, scFv XENP20378

SEQ ID NO: 28973 - protein, 6 aa, synthetic construct
  REGION 1..6: note = Description of Artificial Sequence: Synthetic peptide
  REGION 1..6: note = Fab XENP20341, scFv XENP20378 vhCDR1
SSYTMH

SEQ ID NO: 28974 - protein, 17 aa, synthetic construct
  REGION 1..17: note = Description of Artificial Sequence: Synthetic peptide
  REGION 1..17: note = Fab XENP20341, scFv XENP20378 vhCDR2
FISYDGNHKYYADSVKG

SEQ ID NO: 28975 - protein, 9 aa, synthetic construct
  REGION 1..9: note = Description of Artificial Sequence: Synthetic peptide
  REGION 1..9: note = Fab XENP20341, scFv XENP20378 vhCDR3
TGHLGPFDL

SEQ ID NO: 28976 - protein, 20 aa, synthetic construct
  REGION 1..20: note = Description of Artificial Sequence: Synthetic peptide
  REGION 1..20: note = Fab XENP20341, scFv XENP20378 scFv linker
GKPGSGKPGSGKPGSGKPGS

SEQ ID NO: 28977 - protein, 108 aa, synthetic construct; identical to SEQ ID NO: 7345
  REGION 1..108: note = Description of Artificial Sequence: Synthetic polypeptide
  REGION 1..108: note = VL of Fab XENP20341, scFv XENP20378

SEQ ID NO: 28978 - protein, 12 aa, synthetic construct
  REGION 1..12: note = Description of Artificial Sequence: Synthetic peptide
  REGION 1..12: note = Fab XENP20341, scFv XENP20378 vlCDR1
RASQSVGSSYLA

SEQ ID NO: 28979 - protein, 7 aa, synthetic construct
  REGION 1..7: note = Description of Artificial Sequence: Synthetic peptide
  REGION 1..7: note = Fab XENP20341, scFv XENP20378 vlCDR2
GAFSRAT

SEQ ID NO: 28980 - protein, 9 aa, synthetic construct
  REGION 1..9: note = Description of Artificial Sequence: Synthetic peptide
  REGION 1..9: note = Fab XENP20341, scFv XENP20378 vlCDR3
QQYGSSPWT

SEQ ID NO: 28981 - protein, 246 aa, synthetic construct; identical to SEQ ID NO: 7343
  REGION 1..246: note = Description of Artificial Sequence: Synthetic polypeptide
  REGION 1..246: note = Fab XENP20341, scFv XENP20378 scFv

SEQ ID NO: 28982 - protein, 118 aa, synthetic construct; identical to SEQ ID NO: 7137
  REGION 1..118: note = Description of Artificial Sequence: Synthetic polypeptide
  REGION 1..118: note = VH of Fab XENP20342, scFv XENP20379

SEQ ID NO: 28983 - protein, 5 aa, synthetic construct
  REGION 1..5: note = Description of Artificial Sequence: Synthetic peptide
  REGION 1..5: note = Fab XENP20342, scFv XENP20379 vhCDR1
SYTMH

SEQ ID NO: 28984 - protein, 17 aa, synthetic construct
  REGION 1..17: note = Description of Artificial Sequence: Synthetic peptide
  REGION 1..17: note = Fab XENP20342, scFv XENP20379 vhCDR2
FISYDGNHKYYADSVKG

SEQ ID NO: 28985 - protein, 9 aa, synthetic construct
  REGION 1..9: note = Description of Artificial Sequence: Synthetic peptide
  REGION 1..9: note = Fab XENP20342, scFv XENP20379 vhCDR3
TGHLGPFDL

SEQ ID NO: 28986 - protein, 20 aa, synthetic construct
  REGION 1..20: note = Description of Artificial Sequence: Synthetic peptide
  REGION 1..20: note = Fab XENP20342, scFv XENP20379 scFv linker
GKPGSGKPGSGKPGSGKPGS

SEQ ID NO: 28987 - protein, 108 aa, synthetic construct; identical to SEQ ID NO: 3741
  REGION 1..108: note = Description of Artificial Sequence: Synthetic polypeptide
  REGION 1..108: note = VL of Fab XENP20342, scFv XENP20379

SEQ ID NO: 28988 - protein, 12 aa, synthetic construct
  REGION 1..12: note = Description of Artificial Sequence: Synthetic peptide
  REGION 1..12: note = Fab XENP20342, scFv XENP20379 vlCDR1
RASQSVGSSYLA

SEQ ID NO: 28989 - protein, 7 aa, synthetic construct
  REGION 1..7: note = Description of Artificial Sequence: Synthetic peptide
  REGION 1..7: note = Fab XENP20342, scFv XENP20379 vlCDR2
GAFSRAT

SEQ ID NO: 28990 - protein, 9 aa, synthetic construct
  REGION 1..9: note = Description of Artificial Sequence: Synthetic peptide
  REGION 1..9: note = Fab XENP20342, scFv XENP20379 vlCDR3
QQYGSSPWT

SEQ ID NO: 28991 - protein, 246 aa, synthetic construct; identical to SEQ ID NO: 7352
  REGION 1..246: note = Description of Artificial Sequence: Synthetic polypeptide
  REGION 1..246: note = Fab XENP20342, scFv XENP20379 scFv

SEQ ID NO: 28992 - protein, 118 aa, synthetic construct; identical to SEQ ID NO: 7137
  REGION 1..118: note = Description of Artificial Sequence: Synthetic polypeptide
  REGION 1..118: note = VH of Fab XENP20071, scFv XENP20078

SEQ ID NO: 28993 - protein, 5 aa, synthetic construct
  REGION 1..5: note = Description of Artificial Sequence: Synthetic peptide
  REGION 1..5: note = Fab XENP20071, scFv XENP20078 vhCDR1
SYTMH

SEQ ID NO: 28994 - protein, 17 aa, synthetic construct
  REGION 1..17: note = Description of Artificial Sequence: Synthetic peptide
  REGION 1..17: note = Fab XENP20071, scFv XENP20078 vhCDR2
FISYDGNHKYYADSVKG

SEQ ID NO: 28995 - protein, 9 aa, synthetic construct
  REGION 1..9: note = Description of Artificial Sequence: Synthetic peptide
  REGION 1..9: note = Fab XENP20071, scFv XENP20078 vhCDR3
TGHLGPFDL

SEQ ID NO: 28996 - protein, 20 aa, synthetic construct
  REGION 1..20: note = Description of Artificial Sequence: Synthetic peptide
  REGION 1..20: note = Fab XENP20071, scFv XENP20078 scFv linker
GKPGSGKPGSGKPGSGKPGS

SEQ ID NO: 28997 - protein, 108 aa, synthetic construct; identical to SEQ ID NO: 6193
  REGION 1..108: note = Description of Artificial Sequence: Synthetic polypeptide
  REGION 1..108: note = VL of Fab XENP20071, scFv XENP20078

SEQ ID NO: 28998 - protein, 12 aa, synthetic construct
  REGION 1..12: note = Description of Artificial Sequence: Synthetic peptide
  REGION 1..12: note = Fab XENP20071, scFv XENP20078 vlCDR1
RASQSVGSSYLA

SEQ ID NO: 28999 - protein, 7 aa, synthetic construct
  REGION 1..7: note = Description of Artificial Sequence: Synthetic peptide
  REGION 1..7: note = Fab XENP20071, scFv XENP20078 vlCDR2
GAFSRAT

SEQ ID NO: 29000 - protein, 9 aa, synthetic construct
  REGION 1..9: note = Description of Artificial Sequence: Synthetic peptide
  REGION 1..9: note = Fab XENP20071, scFv XENP20078 vlCDR3
QQYGSSPWT

SEQ ID NO: 29001 - protein, 246 aa, synthetic construct; identical to SEQ ID NO: 7136
  REGION 1..246: note = Description of Artificial Sequence: Synthetic polypeptide
  REGION 1..246: note = Fab XENP20071, scFv XENP20078 scFv

SEQ ID NO: 29002 - protein, 118 aa, synthetic construct; identical to SEQ ID NO: 7137
  REGION 1..118: note = Description of Artificial Sequence: Synthetic polypeptide
  REGION 1..118: note = VH of Fab XENP20344, scFv XENP20381

SEQ ID NO: 29003 - protein, 5 aa, synthetic construct
  REGION 1..5: note = Description of Artificial Sequence: Synthetic peptide
  REGION 1..5: note = Fab XENP20344, scFv XENP20381 vhCDR1
SYTMH

SEQ ID NO: 29004 - protein, 17 aa, synthetic construct
  REGION 1..17: note = Description of Artificial Sequence: Synthetic peptide
  REGION 1..17: note = Fab XENP20344, scFv XENP20381 vhCDR2
FISYDGNHKYYADSVKG

SEQ ID NO: 29005 - protein, 9 aa, synthetic construct
  REGION 1..9: note = Description of Artificial Sequence: Synthetic peptide
  REGION 1..9: note = Fab XENP20344, scFv XENP20381 vhCDR3
TGHLGPFDL

SEQ ID NO: 29006 - protein, 20 aa, synthetic construct
  REGION 1..20: note = Description of Artificial Sequence: Synthetic peptide
  REGION 1..20: note = Fab XENP20344, scFv XENP20381 scFv linker
GKPGSGKPGSGKPGSGKPGS

SEQ ID NO: 29007 - protein, 108 aa, synthetic construct; identical to SEQ ID NO: 7372
  REGION 1..108: note = Description of Artificial Sequence: Synthetic polypeptide
  REGION 1..108: note = VL of Fab XENP20344, scFv XENP20381

SEQ ID NO: 29008 - protein, 12 aa, synthetic construct
  REGION 1..12: note = Description of Artificial Sequence: Synthetic peptide
  REGION 1..12: note = Fab XENP20344, scFv XENP20381 vlCDR1
RASQSVGSSYLA

SEQ ID NO: 29009 - protein, 7 aa, synthetic construct
  REGION 1..7: note = Description of Artificial Sequence: Synthetic peptide
  REGION 1..7: note = Fab XENP20344, scFv XENP20381 vlCDR2
GASSRAT

SEQ ID NO: 29010 - protein, 9 aa, synthetic construct
  REGION 1..9: note = Description of Artificial Sequence: Synthetic peptide
  REGION 1..9: note = Fab XENP20344, scFv XENP20381 vlCDR3
QQYGSSPWT

SEQ ID NO: 29011 - protein, 246 aa, synthetic construct; identical to SEQ ID NO: 7370
  REGION 1..246: note = Description of Artificial Sequence: Synthetic polypeptide
  REGION 1..246: note = Fab XENP20344, scFv XENP20381 scFv

SEQ ID NO: 29012 - protein, 118 aa, synthetic construct; identical to SEQ ID NO: 7137
  REGION 1..118: note = Description of Artificial Sequence: Synthetic polypeptide
  REGION 1..118: note = VH of Fab XENP20345, scFv XENP20382

SEQ ID NO: 29013 - protein, 5 aa, synthetic construct
  REGION 1..5: note = Description of Artificial Sequence: Synthetic peptide
  REGION 1..5: note = Fab XENP20345, scFv XENP20382 vhCDR1
SYTMH

SEQ ID NO: 29014 - protein, 17 aa, synthetic construct
  REGION 1..17: note = Description of Artificial Sequence: Synthetic peptide
  REGION 1..17: note = Fab XENP20345, scFv XENP20382 vhCDR2
FISYDGNHKYYADSVKG

SEQ ID NO: 29015 - protein, 9 aa, synthetic construct
  REGION 1..9: note = Description of Artificial Sequence: Synthetic peptide
  REGION 1..9: note = Fab XENP20345, scFv XENP20382 vhCDR3
TGHLGPFDL

SEQ ID NO: 29016 - protein, 20 aa, synthetic construct
  REGION 1..20: note = Description of Artificial Sequence: Synthetic peptide
  REGION 1..20: note = Fab XENP20345, scFv XENP20382 scFv linker
GKPGSGKPGSGKPGSGKPGS

SEQ ID NO: 29017 - protein, 108 aa, synthetic construct; identical to SEQ ID NO: 6157
  REGION 1..108: note = Description of Artificial Sequence: Synthetic polypeptide
  REGION 1..108: note = VL of Fab XENP20345, scFv XENP20382

SEQ ID NO: 29018 - protein, 12 aa, synthetic construct
  REGION 1..12: note = Description of Artificial Sequence: Synthetic peptide
  REGION 1..12: note = Fab XENP20345, scFv XENP20382 vlCDR1
RASQSVGSSYLA

SEQ ID NO: 29019 - protein, 7 aa, synthetic construct
  REGION 1..7: note = Description of Artificial Sequence: Synthetic peptide
  REGION 1..7: note = Fab XENP20345, scFv XENP20382 vlCDR2
GAFSRAT

SEQ ID NO: 29020 - protein, 9 aa, synthetic construct
  REGION 1..9: note = Description of Artificial Sequence: Synthetic peptide
  REGION 1..9: note = Fab XENP20345, scFv XENP20382 vlCDR3
QQYGSSPWT

SEQ ID NO: 29021 - protein, 246 aa, synthetic construct; identical to SEQ ID NO: 7379
  REGION 1..246: note = Description of Artificial Sequence: Synthetic polypeptide
  REGION 1..246: note = Fab XENP20345, scFv XENP20382 scFv

SEQ ID NO: 29022 - protein, 118 aa, synthetic construct; identical to SEQ ID NO: 7137
  REGION 1..118: note = Description of Artificial Sequence: Synthetic polypeptide
  REGION 1..118: note = VH of Fab XENP20346, scFv XENP20383

SEQ ID NO: 29023 - protein, 5 aa, synthetic construct
  REGION 1..5: note = Description of Artificial Sequence: Synthetic peptide
  REGION 1..5: note = Fab XENP20346, scFv XENP20383 vhCDR1
SYTMH

SEQ ID NO: 29024 - protein, 17 aa, synthetic construct
  REGION 1..17: note = Description of Artificial Sequence: Synthetic peptide
  REGION 1..17: note = Fab XENP20346, scFv XENP20383 vhCDR2
FISYDGNHKYYADSVKG

SEQ ID NO: 29025 - protein, 9 aa, synthetic construct
  REGION 1..9: note = Description of Artificial Sequence: Synthetic peptide
  REGION 1..9: note = Fab XENP20346, scFv XENP20383 vhCDR3
TGHLGPFDL

SEQ ID NO: 29026 - protein, 20 aa, synthetic construct
  REGION 1..20: note = Description of Artificial Sequence: Synthetic peptide
  REGION 1..20: note = Fab XENP20346, scFv XENP20383 scFv linker
GKPGSGKPGSGKPGSGKPGS

SEQ ID NO: 29027 - protein, 108 aa, synthetic construct; identical to SEQ ID NO: 7390
  REGION 1..108: note = Description of Artificial Sequence: Synthetic polypeptide
  REGION 1..108: note = VL of Fab XENP20346, scFv XENP20383

SEQ ID NO: 29028 - protein, 12 aa, synthetic construct
  REGION 1..12: note = Description of Artificial Sequence: Synthetic peptide
  REGION 1..12: note = Fab XENP20346, scFv XENP20383 vlCDR1
RASQSVSSSYLA

SEQ ID NO: 29029 - protein, 7 aa, synthetic construct
  REGION 1..7: note = Description of Artificial Sequence: Synthetic peptide
  REGION 1..7: note = Fab XENP20346, scFv XENP20383 vlCDR2
GAFSRAT

SEQ ID NO: 29030 - protein, 9 aa, synthetic construct
  REGION 1..9: note = Description of Artificial Sequence: Synthetic peptide
  REGION 1..9: note = Fab XENP20346, scFv XENP20383 vlCDR3
QQYGSSPWT

SEQ ID NO: 29031 - protein, 246 aa, synthetic construct; identical to SEQ ID NO: 7388
  REGION 1..246: note = Description of Artificial Sequence: Synthetic polypeptide
  REGION 1..246: note = Fab XENP20346, scFv XENP20383 scFv

SEQ ID NO: 29032 - protein, 118 aa, synthetic construct; identical to SEQ ID NO: 7137
  REGION 1..118: note = Description of Artificial Sequence: Synthetic polypeptide
  REGION 1..118: note = VH of Fab XENP20347, scFv XENP20384

SEQ ID NO: 29033 - protein, 5 aa, synthetic construct
  REGION 1..5: note = Description of Artificial Sequence: Synthetic peptide
  REGION 1..5: note = Fab XENP20347, scFv XENP20384 vhCDR1
SYTMH

SEQ ID NO: 29034 - protein, 17 aa, synthetic construct
  REGION 1..17: note = Description of Artificial Sequence: Synthetic peptide
  REGION 1..17: note = Fab XENP20347, scFv XENP20384 vhCDR2
FISYDGNHKYYADSVKG

SEQ ID NO: 29035 - protein, 9 aa, synthetic construct
  REGION 1..9: note = Description of Artificial Sequence: Synthetic peptide
  REGION 1..9: note = Fab XENP20347, scFv XENP20384 vhCDR3
TGHLGPFDL

SEQ ID NO: 29036 - protein, 20 aa, synthetic construct
  REGION 1..20: note = Description of Artificial Sequence: Synthetic peptide
  REGION 1..20: note = Fab XENP20347, scFv XENP20384 scFv linker
GKPGSGKPGSGKPGSGKPGS

SEQ ID NO: 29037 - protein, 108 aa, synthetic construct; identical to SEQ ID NO: 7399
  REGION 1..108: note = Description of Artificial Sequence: Synthetic polypeptide
  REGION 1..108: note = VL of Fab XENP20347, scFv XENP20384

SEQ ID NO: 29038 - protein, 12 aa, synthetic construct
  REGION 1..12: note = Description of Artificial Sequence: Synthetic peptide
  REGION 1..12: note = Fab XENP20347, scFv XENP20384 vlCDR1
RASQSVGSSYLA

SEQ ID NO: 29039 - protein, 7 aa, synthetic construct
  REGION 1..7: note = Description of Artificial Sequence: Synthetic peptide
  REGION 1..7: note = Fab XENP20347, scFv XENP20384 vlCDR2
GASSRAT

SEQ ID NO: 29040 - protein, 9 aa, synthetic construct
  REGION 1..9: note = Description of Artificial Sequence: Synthetic peptide
  REGION 1..9: note = Fab XENP20347, scFv XENP20384 vlCDR3
QQYGSSPWT

SEQ ID NO: 29041 - protein, 246 aa, synthetic construct; identical to SEQ ID NO: 7397
  REGION 1..246: note = Description of Artificial Sequence: Synthetic polypeptide
  REGION 1..246: note = Fab XENP20347, scFv XENP20384 scFv

SEQ ID NO: 29042 - protein, 118 aa, synthetic construct; identical to SEQ ID NO: 7137
  REGION 1..118: note = Description of Artificial Sequence: Synthetic polypeptide
  REGION 1..118: note = VH of Fab XENP20348, scFv XENP20385

SEQ ID NO: 29043 - protein, 5 aa, synthetic construct
  REGION 1..5: note = Description of Artificial Sequence: Synthetic peptide
  REGION 1..5: note = Fab XENP20348, scFv XENP20385 vhCDR1
SYTMH

SEQ ID NO: 29044 - protein, 17 aa, synthetic construct
  REGION 1..17: note = Description of Artificial Sequence: Synthetic peptide
  REGION 1..17: note = Fab XENP20348, scFv XENP20385 vhCDR2
FISYDGNHKYYADSVKG

SEQ ID NO: 29045 - protein, 9 aa, synthetic construct
  REGION 1..9: note = Description of Artificial Sequence: Synthetic peptide
  REGION 1..9: note = Fab XENP20348, scFv XENP20385 vhCDR3
TGHLGPFDL

SEQ ID NO: 29046 - protein, 20 aa, synthetic construct
  REGION 1..20: note = Description of Artificial Sequence: Synthetic peptide
  REGION 1..20: note = Fab XENP20348, scFv XENP20385 scFv linker
GKPGSGKPGSGKPGSGKPGS

SEQ ID NO: 29047 - protein, 108 aa, synthetic construct; identical to SEQ ID NO: 2411
  REGION 1..108: note = Description of Artificial Sequence: Synthetic polypeptide
  REGION 1..108: note = VL of Fab XENP20348, scFv XENP20385

SEQ ID NO: 29048 - protein, 12 aa, synthetic construct
  REGION 1..12: note = Description of Artificial Sequence: Synthetic peptide
  REGION 1..12: note = Fab XENP20348, scFv XENP20385 vlCDR1
RASQSVSSSYLA

SEQ ID NO: 29049 - protein, 7 aa, synthetic construct
  REGION 1..7: note = Description of Artificial Sequence: Synthetic peptide
  REGION 1..7: note = Fab XENP20348, scFv XENP20385 vlCDR2
GAFSRAT

SEQ ID NO: 29050 - protein, 9 aa, synthetic construct
  REGION 1..9: note = Description of Artificial Sequence: Synthetic peptide
  REGION 1..9: note = Fab XENP20348, scFv XENP20385 vlCDR3
QQYGSSPWT

SEQ ID NO: 29051 - protein, 246 aa, synthetic construct; identical to SEQ ID NO: 7406
  REGION 1..246: note = Description of Artificial Sequence: Synthetic polypeptide
  REGION 1..246: note = Fab XENP20348, scFv XENP20385 scFv

SEQ ID NO: 29052 - protein, 118 aa, synthetic construct; identical to SEQ ID NO: 7137
  REGION 1..118: note = Description of Artificial Sequence: Synthetic polypeptide
  REGION 1..118: note = VH of Fab XENP20349, scFv XENP20386

SEQ ID NO: 29053 - protein, 5 aa, synthetic construct
  REGION 1..5: note = Description of Artificial Sequence: Synthetic peptide
  REGION 1..5: note = Fab XENP20349, scFv XENP20386 vhCDR1
SYTMH

SEQ ID NO: 29054 - protein, 17 aa, synthetic construct
  REGION 1..17: note = Description of Artificial Sequence: Synthetic peptide
  REGION 1..17: note = Fab XENP20349, scFv XENP20386 vhCDR2
FISYDGNHKYYADSVKG

SEQ ID NO: 29055 - protein, 9 aa, synthetic construct
  REGION 1..9: note = Description of Artificial Sequence: Synthetic peptide
  REGION 1..9: note = Fab XENP20349, scFv XENP20386 vhCDR3
TGHLGPFDL

SEQ ID NO: 29056 - protein, 20 aa, synthetic construct
  REGION 1..20: note = Description of Artificial Sequence: Synthetic peptide
  REGION 1..20: note = Fab XENP20349, scFv XENP20386 scFv linker
GKPGSGKPGSGKPGSGKPGS

SEQ ID NO: 29057 - protein, 108 aa, synthetic construct; identical to SEQ ID NO: 6742
  REGION 1..108: note = Description of Artificial Sequence: Synthetic polypeptide
  REGION 1..108: note = VL of Fab XENP20349, scFv XENP20386

SEQ ID NO: 29058 - protein, 12 aa, synthetic construct
  REGION 1..12: note = Description of Artificial Sequence: Synthetic peptide
  REGION 1..12: note = Fab XENP20349, scFv XENP20386 vlCDR1
RASQSVGSSYLA

SEQ ID NO: 29059 - protein, 7 aa, synthetic construct
  REGION 1..7: note = Description of Artificial Sequence: Synthetic peptide
  REGION 1..7: note = Fab XENP20349, scFv XENP20386 vlCDR2
GASSRAT

SEQ ID NO: 29060 - protein, 9 aa, synthetic construct
  REGION 1..9: note = Description of Artificial Sequence: Synthetic peptide
  REGION 1..9: note = Fab XENP20349, scFv XENP20386 vlCDR3
QQYGSSPWT

SEQ ID NO: 29061 - protein, 246 aa, synthetic construct; identical to SEQ ID NO: 7415
  REGION 1..246: note = Description of Artificial Sequence: Synthetic polypeptide
  REGION 1..246: note = Fab XENP20349, scFv XENP20386 scFv

SEQ ID NO: 29062 - protein, 118 aa, synthetic construct; identical to SEQ ID NO: 7137
  REGION 1..118: note = Description of Artificial Sequence: Synthetic polypeptide
  REGION 1..118: note = VH of Fab XENP20350, scFv XENP20387

SEQ ID NO: 29063 - protein, 5 aa, synthetic construct
  REGION 1..5: note = Description of Artificial Sequence: Synthetic peptide
  REGION 1..5: note = Fab XENP20350, scFv XENP20387 vhCDR1
SYTMH

SEQ ID NO: 29064 - protein, 17 aa, synthetic construct
  REGION 1..17: note = Description of Artificial Sequence: Synthetic peptide
  REGION 1..17: note = Fab XENP20350, scFv XENP20387 vhCDR2
FISYDGNHKYYADSVKG

SEQ ID NO: 29065 - protein, 9 aa, synthetic construct
  REGION 1..9: note = Description of Artificial Sequence: Synthetic peptide
  REGION 1..9: note = Fab XENP20350, scFv XENP20387 vhCDR3
TGHLGPFDL

SEQ ID NO: 29066 - protein, 20 aa, synthetic construct
  REGION 1..20: note = Description of Artificial Sequence: Synthetic peptide
  REGION 1..20: note = Fab XENP20350, scFv XENP20387 scFv linker
GKPGSGKPGSGKPGSGKPGS

SEQ ID NO: 29067 - protein, 108 aa, synthetic construct; identical to SEQ ID NO: 7426
  REGION 1..108: note = Description of Artificial Sequence: Synthetic polypeptide
  REGION 1..108: note = VL of Fab XENP20350, scFv XENP20387

SEQ ID NO: 29068 - protein, 12 aa, synthetic construct
  REGION 1..12: note = Description of Artificial Sequence: Synthetic peptide
  REGION 1..12: note = Fab XENP20350, scFv XENP20387 vlCDR1
RASQSVSSSYLA

SEQ ID NO: 29069 - protein, 7 aa, synthetic construct
  REGION 1..7: note = Description of Artificial Sequence: Synthetic peptide
  REGION 1..7: note = Fab XENP20350, scFv XENP20387 vlCDR2
GASSRAT

SEQ ID NO: 29070 - protein, 9 aa, synthetic construct
  REGION 1..9: note = Description of Artificial Sequence: Synthetic peptide
  REGION 1..9: note = Fab XENP20350, scFv XENP20387 vlCDR3
QQYGSSPWT

SEQ ID NO: 29071 - protein, 246 aa, synthetic construct; identical to SEQ ID NO: 7424
  REGION 1..246: note = Description of Artificial Sequence: Synthetic polypeptide
  REGION 1..246: note = Fab XENP20350, scFv XENP20387 scFv

SEQ ID NO: 29072 - protein, 118 aa, synthetic construct; identical to SEQ ID NO: 7137
  REGION 1..118: note = Description of Artificial Sequence: Synthetic polypeptide
  REGION 1..118: note = VH of Fab XENP20351, scFv XENP20388

SEQ ID NO: 29073 - protein, 5 aa, synthetic construct
  REGION 1..5: note = Description of Artificial Sequence: Synthetic peptide
  REGION 1..5: note = Fab XENP20351, scFv XENP20388 vhCDR1
SYTMH

SEQ ID NO: 29074 - protein, 17 aa, synthetic construct
  REGION 1..17: note = Description of Artificial Sequence: Synthetic peptide
  REGION 1..17: note = Fab XENP20351, scFv XENP20388 vhCDR2
FISYDGNHKYYADSVKG

SEQ ID NO: 29075 - protein, 9 aa, synthetic construct
  REGION 1..9: note = Description of Artificial Sequence: Synthetic peptide
  REGION 1..9: note = Fab XENP20351, scFv XENP20388 vhCDR3
TGHLGPFDL

SEQ ID NO: 29076 - protein, 20 aa, synthetic construct
  REGION 1..20: note = Description of Artificial Sequence: Synthetic peptide
  REGION 1..20: note = Fab XENP20351, scFv XENP20388 scFv linker
GKPGSGKPGSGKPGSGKPGS

SEQ ID NO: 29077 - protein, 108 aa, synthetic construct; identical to SEQ ID NO: 7435
  REGION 1..108: note = Description of Artificial Sequence: Synthetic polypeptide
  REGION 1..108: note = VL of Fab XENP20351, scFv XENP20388

SEQ ID NO: 29078 - protein, 12 aa, synthetic construct
  REGION 1..12: note = Description of Artificial Sequence: Synthetic peptide
  REGION 1..12: note = Fab XENP20351, scFv XENP20388 vlCDR1
RASQSVSSSYLA

SEQ ID NO: 29079 - protein, 7 aa, synthetic construct
  REGION 1..7: note = Description of Artificial Sequence: Synthetic peptide
  REGION 1..7: note = Fab XENP20351, scFv XENP20388 vlCDR2
GAFSRAT

SEQ ID NO: 29080 - protein, 9 aa, synthetic construct
  REGION 1..9: note = Description of Artificial Sequence: Synthetic peptide
  REGION 1..9: note = Fab XENP20351, scFv XENP20388 vlCDR3
QQYGSSPWT

SEQ ID NO: 29081 - protein, 246 aa, synthetic construct; identical to SEQ ID NO: 7433
  REGION 1..246: note = Description of Artificial Sequence: Synthetic polypeptide
  REGION 1..246: note = Fab XENP20351, scFv XENP20388 scFv

SEQ ID NO: 29082 - protein, 20 aa, synthetic construct
  REGION 1..20: note = Description of Artificial Sequence: Synthetic peptide
  REGION 1..20: note = Fab XENP20352, scFv XENP20389 scFv linker
GKPGSGKPGSGKPGSGKPGS

SEQ ID NO: 29083 - protein, 118 aa, synthetic construct; identical to SEQ ID NO: 7137
  REGION 1..118: note = Description of Artificial Sequence: Synthetic polypeptide
  REGION 1..118: note = VL of Fab XENP20352, scFv XENP20389

SEQ ID NO: 29084 - protein, 5 aa, synthetic construct
  REGION 1..5: note = Description of Artificial Sequence: Synthetic peptide
  REGION 1..5: note = Fab XENP20352, scFv XENP20389 vlCDR1
SYTMH

SEQ ID NO: 29085 - protein, 17 aa, synthetic construct
  REGION 1..17: note = Description of Artificial Sequence: Synthetic peptide
  REGION 1..17: note = Fab XENP20352, scFv XENP20389 vlCDR2
FISYDGNHKYYADSVKG

SEQ ID NO: 29086 - protein, 9 aa, synthetic construct
  REGION 1..9: note = Description of Artificial Sequence: Synthetic peptide
  REGION 1..9: note = Fab XENP20352, scFv XENP20389 vlCDR3
TGHLGPFDL

SEQ ID NO: 29087 - protein, 246 aa, synthetic construct; identical to SEQ ID NO: 7442
  REGION 1..246: note = Description of Artificial Sequence: Synthetic polypeptide
  REGION 1..246: note = Fab XENP20352, scFv XENP20389 scFv

SEQ ID NO: 29088 - protein, 118 aa, synthetic construct; identical to SEQ ID NO: 7137
  REGION 1..118: note = Description of Artificial Sequence: Synthetic polypeptide
  REGION 1..118: note = VH of Fab XENP20353, scFv XENP20390

SEQ ID NO: 29089 - protein, 5 aa, synthetic construct
  REGION 1..5: note = Description of Artificial Sequence: Synthetic peptide
  REGION 1..5: note = Fab XENP20353, scFv XENP20390 vhCDR1
SYTMH

SEQ ID NO: 29090 - protein, 17 aa, synthetic construct
  REGION 1..17: note = Description of Artificial Sequence: Synthetic peptide
  REGION 1..17: note = Fab XENP20353, scFv XENP20390 vhCDR2
FISYDGNHKYYADSVKG

SEQ ID NO: 29091 - protein, 9 aa, synthetic construct
  REGION 1..9: note = Description of Artificial Sequence: Synthetic peptide
  REGION 1..9: note = Fab XENP20353, scFv XENP20390 vhCDR3
TGHLGPFDL

SEQ ID NO: 29092 - protein, 20 aa, synthetic construct
  REGION 1..20: note = Description of Artificial Sequence: Synthetic peptide
  REGION 1..20: note = Fab XENP20353, scFv XENP20390 scFv linker
GKPGSGKPGSGKPGSGKPGS

SEQ ID NO: 29093 - protein, 108 aa, synthetic construct; identical to SEQ ID NO: 7453
  REGION 1..108: note = Description of Artificial Sequence: Synthetic polypeptide
  REGION 1..108: note = VL of Fab XENP20353, scFv XENP20390

SEQ ID NO: 29094 - protein, 12 aa, synthetic construct
  REGION 1..12: note = Description of Artificial Sequence: Synthetic peptide
  REGION 1..12: note = Fab XENP20353, scFv XENP20390 vlCDR1
RASQSVSSSYLA

SEQ ID NO: 29095 - protein, 7 aa, synthetic construct
  REGION 1..7: note = Description of Artificial Sequence: Synthetic peptide
  REGION 1..7: note = Fab XENP20353, scFv XENP20390 vlCDR2
GASSRAT

SEQ ID NO: 29096 - protein, 9 aa, synthetic construct
  REGION 1..9: note = Description of Artificial Sequence: Synthetic peptide
  REGION 1..9: note = Fab XENP20353, scFv XENP20390 vlCDR3
QQYGSSPWT

SEQ ID NO: 29097 - protein, 246 aa, synthetic construct; identical to SEQ ID NO: 7451
  REGION 1..246: note = Description of Artificial Sequence: Synthetic polypeptide
  REGION 1..246: note = Fab XENP20353, scFv XENP20390 scFv

SEQ ID NO: 29098 - protein, 118 aa, synthetic construct; identical to SEQ ID NO: 7137
  REGION 1..118: note = Description of Artificial Sequence: Synthetic polypeptide
  REGION 1..118: note = VH of Fab XENP20354, scFv XENP20391

SEQ ID NO: 29099 - protein, 5 aa, synthetic construct
  REGION 1..5: note = Description of Artificial Sequence: Synthetic peptide
  REGION 1..5: note = Fab XENP20354, scFv XENP20391 vhCDR1
SYTMH

SEQ ID NO: 29100 - protein, 17 aa, synthetic construct
  REGION 1..17: note = Description of Artificial Sequence: Synthetic peptide
  REGION 1..17: note = Fab XENP20354, scFv XENP20391 vhCDR2
FISYDGNHKYYADSVKG

SEQ ID NO: 29101 - protein, 9 aa, synthetic construct
  REGION 1..9: note = Description of Artificial Sequence: Synthetic peptide
  REGION 1..9: note = Fab XENP20354, scFv XENP20391 vhCDR3
TGHLGPFDL

SEQ ID NO: 29102 - protein, 20 aa, synthetic construct
  REGION 1..20: note = Description of Artificial Sequence: Synthetic peptide
  REGION 1..20: note = Fab XENP20354, scFv XENP20391 scFv linker
GKPGSGKPGSGKPGSGKPGS

SEQ ID NO: 29103 - protein, 108 aa, synthetic construct; identical to SEQ ID NO: 7462
  REGION 1..108: note = Description of Artificial Sequence: Synthetic polypeptide
  REGION 1..108: note = VL of Fab XENP20354, scFv XENP20391

SEQ ID NO: 29104 - protein, 12 aa, synthetic construct
  REGION 1..12: note = Description of Artificial Sequence: Synthetic peptide
  REGION 1..12: note = Fab XENP20354, scFv XENP20391 vlCDR1
RASQSVSSSYLA

SEQ ID NO: 29105 - protein, 7 aa, synthetic construct
  REGION 1..7: note = Description of Artificial Sequence: Synthetic peptide
  REGION 1..7: note = Fab XENP20354, scFv XENP20391 vlCDR2
GASSRAT

SEQ ID NO: 29106 - protein, 9 aa, synthetic construct
  REGION 1..9: note = Description of Artificial Sequence: Synthetic peptide
  REGION 1..9: note = Fab XENP20354, scFv XENP20391 vlCDR3
QQYGSSPWT

SEQ ID NO: 29107 - protein, 246 aa, synthetic construct; identical to SEQ ID NO: 7460
  REGION 1..246: note = Description of Artificial Sequence: Synthetic polypeptide
  REGION 1..246: note = Fab XENP20354, scFv XENP20391 scFv

SEQ ID NO: 29108 - protein, 118 aa, synthetic construct; identical to SEQ ID NO: 7137
  REGION 1..118: note = Description of Artificial Sequence: Synthetic polypeptide
  REGION 1..118: note = VH of Fab XENP20355, scFv XENP20392

SEQ ID NO: 29109 - protein, 5 aa, synthetic construct
  REGION 1..5: note = Description of Artificial Sequence: Synthetic peptide
  REGION 1..5: note = Fab XENP20355, scFv XENP20392 vhCDR1
SYTMH

SEQ ID NO: 29110 - protein, 17 aa, synthetic construct
  REGION 1..17: note = Description of Artificial Sequence: Synthetic peptide
  REGION 1..17: note = Fab XENP20355, scFv XENP20392 vhCDR2
FISYDGNHKYYADSVKG

SEQ ID NO: 29111 - protein, 9 aa, synthetic construct
  REGION 1..9: note = Description of Artificial Sequence: Synthetic peptide
  REGION 1..9: note = Fab XENP20355, scFv XENP20392 vhCDR3
TGHLGPFDL

SEQ ID NO: 29112 - protein, 20 aa, synthetic construct
  REGION 1..20: note = Description of Artificial Sequence: Synthetic peptide
  REGION 1..20: note = Fab XENP20355, scFv XENP20392 scFv linker
GKPGSGKPGSGKPGSGKPGS

SEQ ID NO: 29113 - protein, 108 aa, synthetic construct; identical to SEQ ID NO: 7471
  REGION 1..108: note = Description of Artificial Sequence: Synthetic polypeptide
  REGION 1..108: note = VL of Fab XENP20355, scFv XENP20392

SEQ ID NO: 29114 - protein, 12 aa, synthetic construct
  REGION 1..12: note = Description of Artificial Sequence: Synthetic peptide
  REGION 1..12: note = Fab XENP20355, scFv XENP20392 vlCDR1
RASQSVSSSYLA

SEQ ID NO: 29115 - protein, 7 aa, synthetic construct
  REGION 1..7: note = Description of Artificial Sequence: Synthetic peptide
  REGION 1..7: note = Fab XENP20355, scFv XENP20392 vlCDR2
GASSRAT

SEQ ID NO: 29116 - protein, 9 aa, synthetic construct
  REGION 1..9: note = Description of Artificial Sequence: Synthetic peptide
  REGION 1..9: note = Fab XENP20355, scFv XENP20392 vlCDR3
QQYGSSPWT

SEQ ID NO: 29117 - protein, 246 aa, synthetic construct; identical to SEQ ID NO: 7469
  REGION 1..246: note = Description of Artificial Sequence: Synthetic polypeptide
  REGION 1..246: note = Fab XENP20355, scFv XENP20392 scFv

SEQ ID NO: 29118 - protein, 118 aa, synthetic construct; identical to SEQ ID NO: 7146
  REGION 1..118: note = Description of Artificial Sequence: Synthetic polypeptide
  REGION 1..118: note = VH of Fab XENP20357, scFv XENP20394

SEQ ID NO: 29119 - protein, 5 aa, synthetic construct
  REGION 1..5: note = Description of Artificial Sequence: Synthetic peptide
  REGION 1..5: note = Fab XENP20357, scFv XENP20394 vhCDR1
SYTMH

SEQ ID NO: 29120 - protein, 17 aa, synthetic construct
  REGION 1..17: note = Description of Artificial Sequence: Synthetic peptide
  REGION 1..17: note = Fab XENP20357, scFv XENP20394 vhCDR2
FISYDGNTKYYADSVKG

SEQ ID NO: 29121 - protein, 9 aa, synthetic construct
  REGION 1..9: note = Description of Artificial Sequence: Synthetic peptide
  REGION 1..9: note = Fab XENP20357, scFv XENP20394 vhCDR3
TGHLGPFDL

SEQ ID NO: 29122 - protein, 20 aa, synthetic construct
  REGION 1..20: note = Description of Artificial Sequence: Synthetic peptide
  REGION 1..20: note = Fab XENP20357, scFv XENP20394 scFv linker
GKPGSGKPGSGKPGSGKPGS

SEQ ID NO: 29123 - protein, 108 aa, synthetic construct; identical to SEQ ID NO: 7489
  REGION 1..108: note = Description of Artificial Sequence: Synthetic polypeptide
  REGION 1..108: note = VL of Fab XENP20357, scFv XENP20394

SEQ ID NO: 29124 - protein, 12 aa, synthetic construct
  REGION 1..12: note = Description of Artificial Sequence: Synthetic peptide
  REGION 1..12: note = Fab XENP20357, scFv XENP20394 vlCDR1
RASQSVSSSYLA

SEQ ID NO: 29125 - protein, 7 aa, synthetic construct
  REGION 1..7: note = Description of Artificial Sequence: Synthetic peptide
  REGION 1..7: note = Fab XENP20357, scFv XENP20394 vlCDR2
GAFSRAT

SEQ ID NO: 29126 - protein, 9 aa, synthetic construct
  REGION 1..9: note = Description of Artificial Sequence: Synthetic peptide
  REGION 1..9: note = Fab XENP20357, scFv XENP20394 vlCDR3
QQYGSSPWT

SEQ ID NO: 29127 - protein, 246 aa, synthetic construct; identical to SEQ ID NO: 7487
  REGION 1..246: note = Description of Artificial Sequence: Synthetic polypeptide
  REGION 1..246: note = Fab XENP20357, scFv XENP20394 scFv

SEQ ID NO: 29128 - protein, 118 aa, synthetic construct; identical to SEQ ID NO: 7146
  REGION 1..118: note = Description of Artificial Sequence: Synthetic polypeptide
  REGION 1..118: note = VH of Fab XENP20358, scFv XENP20395

SEQ ID NO: 29129 - protein, 5 aa, synthetic construct
  REGION 1..5: note = Description of Artificial Sequence: Synthetic peptide
  REGION 1..5: note = Fab XENP20358, scFv XENP20395 vhCDR1
SYTMH

SEQ ID NO: 29130 - protein, 17 aa, synthetic construct
  REGION 1..17: note = Description of Artificial Sequence: Synthetic peptide
  REGION 1..17: note = Fab XENP20358, scFv XENP20395 vhCDR2
FISYDGNTKYYADSVKG

SEQ ID NO: 29131 - protein, 9 aa, synthetic construct
  REGION 1..9: note = Description of Artificial Sequence: Synthetic peptide
  REGION 1..9: note = Fab XENP20358, scFv XENP20395 vhCDR3
TGHLGPFDL

SEQ ID NO: 29132 - protein, 20 aa, synthetic construct
  REGION 1..20: note = Description of Artificial Sequence: Synthetic peptide
  REGION 1..20: note = Fab XENP20358, scFv XENP20395 scFv linker
GKPGSGKPGSGKPGSGKPGS

SEQ ID NO: 29133 - protein, 108 aa, synthetic construct; identical to SEQ ID NO: 7498
  REGION 1..108: note = Description of Artificial Sequence: Synthetic polypeptide
  REGION 1..108: note = VL of Fab XENP20358, scFv XENP20395

SEQ ID NO: 29134 - protein, 12 aa, synthetic construct
  REGION 1..12: note = Description of Artificial Sequence: Synthetic peptide
  REGION 1..12: note = Fab XENP20358, scFv XENP20395 vlCDR1
RASQSVGSSYLA

SEQ ID NO: 29135 - protein, 7 aa, synthetic construct
  REGION 1..7: note = Description of Artificial Sequence: Synthetic peptide
  REGION 1..7: note = Fab XENP20358, scFv XENP20395 vlCDR2
GASSRAT

SEQ ID NO: 29136 - protein, 9 aa, synthetic construct
  REGION 1..9: note = Description of Artificial Sequence: Synthetic peptide
  REGION 1..9: note = Fab XENP20358, scFv XENP20395 vlCDR3
QQYGSSPWT

SEQ ID NO: 29137 - protein, 246 aa, synthetic construct; identical to SEQ ID NO: 7496
  REGION 1..246: note = Description of Artificial Sequence: Synthetic polypeptide
  REGION 1..246: note = Fab XENP20358, scFv XENP20395 scFv

SEQ ID NO: 29138 - protein, 118 aa, synthetic construct; identical to SEQ ID NO: 7146
  REGION 1..118: note = Description of Artificial Sequence: Synthetic polypeptide
  REGION 1..118: note = VH of Fab XENP20359, scFv XENP20396

SEQ ID NO: 29139 - protein, 5 aa, synthetic construct
  REGION 1..5: note = Description of Artificial Sequence: Synthetic peptide
  REGION 1..5: note = Fab XENP20359, scFv XENP20396 vhCDR1
SYTMH

SEQ ID NO: 29140 - protein, 17 aa, synthetic construct
  REGION 1..17: note = Description of Artificial Sequence: Synthetic peptide
  REGION 1..17: note = Fab XENP20359, scFv XENP20396 vhCDR2
FISYDGNTKYYADSVKG

SEQ ID NO: 29141 - protein, 9 aa, synthetic construct
  REGION 1..9: note = Description of Artificial Sequence: Synthetic peptide
  REGION 1..9: note = Fab XENP20359, scFv XENP20396 vhCDR3
TGHLGPFDL

SEQ ID NO: 29142 - protein, 20 aa, synthetic construct
  REGION 1..20: note = Description of Artificial Sequence: Synthetic peptide
  REGION 1..20: note = Fab XENP20359, scFv XENP20396 scFv linker
GKPGSGKPGSGKPGSGKPGS

SEQ ID NO: 29143 - protein, 108 aa, synthetic construct; identical to SEQ ID NO: 7507
  REGION 1..108: note = Description of Artificial Sequence: Synthetic polypeptide
  REGION 1..108: note = VL of Fab XENP20359, scFv XENP20396

SEQ ID NO: 29144 - protein, 12 aa, synthetic construct
  REGION 1..12: note = Description of Artificial Sequence: Synthetic peptide
  REGION 1..12: note = Fab XENP20359, scFv XENP20396 vlCDR1
RASQSVSSSYLA

SEQ ID NO: 29145 - protein, 7 aa, synthetic construct
  REGION 1..7: note = Description of Artificial Sequence: Synthetic peptide
  REGION 1..7: note = Fab XENP20359, scFv XENP20396 vlCDR2
GASSRAT

SEQ ID NO: 29146 - protein, 9 aa, synthetic construct
  REGION 1..9: note = Description of Artificial Sequence: Synthetic peptide
  REGION 1..9: note = Fab XENP20359, scFv XENP20396 vlCDR3
QQYGSSPWT

SEQ ID NO: 29147 - protein, 246 aa, synthetic construct; identical to SEQ ID NO: 7505
  REGION 1..246: note = Description of Artificial Sequence: Synthetic polypeptide
  REGION 1..246: note = Fab XENP20359, scFv XENP20396 scFv

SEQ ID NO: 29148 - protein, 118 aa, synthetic construct; identical to SEQ ID NO: 2405
  REGION 1..118: note = Description of Artificial Sequence: Synthetic polypeptide
  REGION 1..118: note = VH of Fab XENP19546, scFv XENP19553

SEQ ID NO: 29149 - protein, 5 aa, synthetic construct
  REGION 1..5: note = Description of Artificial Sequence: Synthetic peptide
  REGION 1..5: note = Fab XENP19546, scFv XENP19553 vhCDR1
SYTMH

SEQ ID NO: 29150 - protein, 17 aa, synthetic construct
  REGION 1..17: note = Description of Artificial Sequence: Synthetic peptide
  REGION 1..17: note = Fab XENP19546, scFv XENP19553 vhCDR2
FISYDGNNKYYADSVKG

SEQ ID NO: 29151 - protein, 9 aa, synthetic construct
  REGION 1..9: note = Description of Artificial Sequence: Synthetic peptide
  REGION 1..9: note = Fab XENP19546, scFv XENP19553 vhCDR3
TGWLGPFDY

SEQ ID NO: 29152 - protein, 20 aa, synthetic construct
  REGION 1..20: note = Description of Artificial Sequence: Synthetic peptide
  REGION 1..20: note = Fab XENP19546, scFv XENP19553 scFv linker
GKPGSGKPGSGKPGSGKPGS

SEQ ID NO: 29153 - protein, 108 aa, synthetic construct; identical to SEQ ID NO: 3741
  REGION 1..108: note = Description of Artificial Sequence: Synthetic polypeptide
  REGION 1..108: note = VL of Fab XENP19546, scFv XENP19553

SEQ ID NO: 29154 - protein, 12 aa, synthetic construct
  REGION 1..12: note = Description of Artificial Sequence: Synthetic peptide
  REGION 1..12: note = Fab XENP19546, scFv XENP19553 vlCDR1
RASQSVGSSYLA

SEQ ID NO: 29155 - protein, 7 aa, synthetic construct
  REGION 1..7: note = Description of Artificial Sequence: Synthetic peptide
  REGION 1..7: note = Fab XENP19546, scFv XENP19553 vlCDR2
GAFSRAT

SEQ ID NO: 29156 - protein, 9 aa, synthetic construct
  REGION 1..9: note = Description of Artificial Sequence: Synthetic peptide
  REGION 1..9: note = Fab XENP19546, scFv XENP19553 vlCDR3
QQYGSSPWT

SEQ ID NO: 29157 - protein, 246 aa, synthetic construct; identical to SEQ ID NO: 4814
  REGION 1..246: note = Description of Artificial Sequence: Synthetic polypeptide
  REGION 1..246: note = Fab XENP19546, scFv XENP19553 scFv

SEQ ID NO: 29158 - protein, 118 aa, synthetic construct; identical to SEQ ID NO: 2405
  REGION 1..118: note = Description of Artificial Sequence: Synthetic polypeptide
  REGION 1..118: note = VH of XENP20011

SEQ ID NO: 29159 - protein, 5 aa, synthetic construct
  REGION 1..5: note = Description of Artificial Sequence: Synthetic peptide
  REGION 1..5: note = XENP20011 vhCDR1
SYTMH

SEQ ID NO: 29160 - protein, 17 aa, synthetic construct
  REGION 1..17: note = Description of Artificial Sequence: Synthetic peptide
  REGION 1..17: note = XENP20011 vhCDR2
FISYDGNNKYYADSVKG

SEQ ID NO: 29161 - protein, 9 aa, synthetic construct
  REGION 1..9: note = Description of Artificial Sequence: Synthetic peptide
  REGION 1..9: note = XENP20011 vhCDR3
TGWLGPFDY

SEQ ID NO: 29162 - protein, 20 aa, synthetic construct
  REGION 1..20: note = Description of Artificial Sequence: Synthetic peptide
  REGION 1..20: note = XENP20011 scFv linker
GKPGSGKPGSGKPGSGKPGS

SEQ ID NO: 29163 - protein, 108 aa, synthetic construct; identical to SEQ ID NO: 2411
  REGION 1..108: note = Description of Artificial Sequence: Synthetic polypeptide
  REGION 1..108: note = VL of XENP20011

SEQ ID NO: 29164 - protein, 12 aa, synthetic construct
  REGION 1..12: note = Description of Artificial Sequence: Synthetic peptide
  REGION 1..12: note = XENP20011 vlCDR1
RASQSVSSSYLA

SEQ ID NO: 29165 - protein, 7 aa, synthetic construct
  REGION 1..7: note = Description of Artificial Sequence: Synthetic peptide
  REGION 1..7: note = XENP20011 vlCDR2
GAFSRAT

SEQ ID NO: 29166 - protein, 9 aa, synthetic construct
  REGION 1..9: note = Description of Artificial Sequence: Synthetic peptide
  REGION 1..9: note = XENP20011 vlCDR3
QQYGSSPWT

SEQ ID NO: 29167 - protein, 246 aa, synthetic construct
  REGION 1..246: note = Description of Artificial Sequence: Synthetic polypeptide
  REGION 1..246: note = XENP20011 scFv
EVQLVESGGGLVKPGGSLRLSCAASGFTFSSYTMHWVRQAPGKGLEWVSFISYDGNNKYYADSVKGRFTISRDNAKNSLYLQMNSLRAEDTAVYYCARTGWLGPFDYWGQGTLVTVSSGKPGSGKPGSGKPGSGKPGSEIVLTQSPGTLSLSPGERATLSCRASQSVSSSYLAWYQQKPGQAPRLLIYGAFSRATGIPDRFSGSGSGTDFTLTISRLEPEDFAVYYCQQYGSSPWTFGQGTKVEIK

SEQ ID NO: 29168 - protein, 118 aa, synthetic construct; identical to SEQ ID NO: 2405
  REGION 1..118: note = Description of Artificial Sequence: Synthetic polypeptide
  REGION 1..118: note = VH of XENP20052

SEQ ID NO: 29169 - protein, 5 aa, synthetic construct
  REGION 1..5: note = Description of Artificial Sequence: Synthetic peptide
  REGION 1..5: note = XENP20052 vhCDR1
SYTMH

SEQ ID NO: 29170 - protein, 17 aa, synthetic construct
  REGION 1..17: note = Description of Artificial Sequence: Synthetic peptide
  REGION 1..17: note = XENP20052 vhCDR2
FISYDGNNKYYADSVKG

SEQ ID NO: 29171 - protein, 9 aa, synthetic construct
  REGION 1..9: note = Description of Artificial Sequence: Synthetic peptide
  REGION 1..9: note = XENP20052 vhCDR3
TGWLGPFDY

SEQ ID NO: 29172 - protein, 20 aa, synthetic construct
  REGION 1..20: note = Description of Artificial Sequence: Synthetic peptide
  REGION 1..20: note = XENP20052 scFv linker
GKPGSGKPGSGKPGSGKPGS

SEQ ID NO: 29173 - protein, 108 aa, synthetic construct; identical to SEQ ID NO: 6481
  REGION 1..108: note = Description of Artificial Sequence: Synthetic polypeptide
  REGION 1..108: note = VL of XENP20052

SEQ ID NO: 29174 - protein, 12 aa, synthetic construct
  REGION 1..12: note = Description of Artificial Sequence: Synthetic peptide
  REGION 1..12: note = XENP20052 vlCDR1
RASQSVGSSYLS

SEQ ID NO: 29175 - protein, 7 aa, synthetic construct
  REGION 1..7: note = Description of Artificial Sequence: Synthetic peptide
  REGION 1..7: note = XENP20052 vlCDR2
GAFSRAT

SEQ ID NO: 29176 - protein, 9 aa, synthetic construct
  REGION 1..9: note = Description of Artificial Sequence: Synthetic peptide
  REGION 1..9: note = XENP20052 vlCDR3
QQYGSSPWT

SEQ ID NO: 29177 - protein, 246 aa, synthetic construct
  REGION 1..246: note = Description of Artificial Sequence: Synthetic polypeptide
  REGION 1..246: note = XENP20052 scFv
EVQLVESGGGLVKPGGSLRLSCAASGFTFSSYTMHWVRQAPGKGLEWVSFISYDGNNKYYADSVKGRFTISRDNAKNSLYLQMNSLRAEDTAVYYCARTGWLGPFDYWGQGTLVTVSSGKPGSGKPGSGKPGSGKPGSEIVLTQSPGTLSLSPGERATLSCRASQSVGSSYLSWYQQKPGQAPRLLIYGAFSRATGIPDRFSGSGSGTDFTLTISRLEPEDFAVYYCQQYGSSPWTFGQGTKVEIK

SEQ ID NO: 29178 - protein, 118 aa, synthetic construct; identical to SEQ ID NO: 2405
  REGION 1..118: note = Description of Artificial Sequence: Synthetic polypeptide
  REGION 1..118: note = VH of XENP20018

SEQ ID NO: 29179 - protein, 5 aa, synthetic construct
  REGION 1..5: note = Description of Artificial Sequence: Synthetic peptide
  REGION 1..5: note = XENP20018 vhCDR1
SYTMH

SEQ ID NO: 29180 - protein, 17 aa, synthetic construct
  REGION 1..17: note = Description of Artificial Sequence: Synthetic peptide
  REGION 1..17: note = XENP20018 vhCDR2
FISYDGNNKYYADSVKG

SEQ ID NO: 29181 - protein, 9 aa, synthetic construct
  REGION 1..9: note = Description of Artificial Sequence: Synthetic peptide
  REGION 1..9: note = XENP20018 vhCDR3
TGWLGPFDY

SEQ ID NO: 29182 - protein, 20 aa, synthetic construct
  REGION 1..20: note = Description of Artificial Sequence: Synthetic peptide
  REGION 1..20: note = XENP20018 scFv linker
GKPGSGKPGSGKPGSGKPGS

SEQ ID NO: 29183 - protein, 108 aa, synthetic construct; identical to SEQ ID NO: 6688
  REGION 1..108: note = Description of Artificial Sequence: Synthetic polypeptide
  REGION 1..108: note = VL of XENP20018

SEQ ID NO: 29184 - protein, 12 aa, synthetic construct
  REGION 1..12: note = Description of Artificial Sequence: Synthetic peptide
  REGION 1..12: note = XENP20018 vlCDR1
RASQSVGSSYLA

SEQ ID NO: 29185 - protein, 7 aa, synthetic construct
  REGION 1..7: note = Description of Artificial Sequence: Synthetic peptide
  REGION 1..7: note = XENP20018 vlCDR2
DAFSRAT

SEQ ID NO: 29186 - protein, 9 aa, synthetic construct
  REGION 1..9: note = Description of Artificial Sequence: Synthetic peptide
  REGION 1..9: note = XENP20018 vlCDR3
QQYGSSPWT

SEQ ID NO: 29187 - protein, 246 aa, synthetic construct
  REGION 1..246: note = Description of Artificial Sequence: Synthetic polypeptide
  REGION 1..246: note = XENP20018 scFv
EVQLVESGGGLVKPGGSLRLSCAASGFTFSSYTMHWVRQAPGKGLEWVSFISYDGNNKYYADSVKGRFTISRDNAKNSLYLQMNSLRAEDTAVYYCARTGWLGPFDYWGQGTLVTVSSGKPGSGKPGSGKPGSGKPGSEIVLTQSPGTLSLSPGERATLSCRASQSVGSSYLAWYQQKPGQAPRLLIYDAFSRATGIPDRFSGSGSGTDFTLTISRLEPEDFAVYYCQQYGSSPWTFGQGTKVEIK

SEQ ID NO: 29188 - protein, 118 aa, synthetic construct; identical to SEQ ID NO: 2405
  REGION 1..118: note = Description of Artificial Sequence: Synthetic polypeptide
  REGION 1..118: note = VH of XENP20020

SEQ ID NO: 29189 - protein, 5 aa, synthetic construct
  REGION 1..5: note = Description of Artificial Sequence: Synthetic peptide
  REGION 1..5: note = XENP20020 vhCDR1
SYTMH

SEQ ID NO: 29190 - protein, 17 aa, synthetic construct
  REGION 1..17: note = Description of Artificial Sequence: Synthetic peptide
  REGION 1..17: note = XENP20020 vhCDR2
FISYDGNNKYYADSVKG

SEQ ID NO: 29191 - protein, 9 aa, synthetic construct
  REGION 1..9: note = Description of Artificial Sequence: Synthetic peptide
  REGION 1..9: note = XENP20020 vhCDR3
TGWLGPFDY

SEQ ID NO: 29192 - protein, 20 aa, synthetic construct
  REGION 1..20: note = Description of Artificial Sequence: Synthetic peptide
  REGION 1..20: note = XENP20020 scFv linker
GKPGSGKPGSGKPGSGKPGS

SEQ ID NO: 29193 - protein, 108 aa, synthetic construct; identical to SEQ ID NO: 6751
  REGION 1..108: note = Description of Artificial Sequence: Synthetic polypeptide
  REGION 1..108: note = VL of XENP20020

SEQ ID NO: 29194 - protein, 12 aa, synthetic construct
  REGION 1..12: note = Description of Artificial Sequence: Synthetic peptide
  REGION 1..12: note = XENP20020 vlCDR1
RASQSVGSSYLA

SEQ ID NO: 29195 - protein, 7 aa, synthetic construct
  REGION 1..7: note = Description of Artificial Sequence: Synthetic peptide
  REGION 1..7: note = XENP20020 vlCDR2
GAYSRAT

SEQ ID NO: 29196 - protein, 9 aa, synthetic construct
  REGION 1..9: note = Description of Artificial Sequence: Synthetic peptide
  REGION 1..9: note = XENP20020 vlCDR3
QQYGSSPWT

SEQ ID NO: 29197 - protein, 246 aa, synthetic construct
  REGION 1..246: note = Description of Artificial Sequence: Synthetic polypeptide
  REGION 1..246: note = XENP20020 scFv
EVQLVESGGGLVKPGGSLRLSCAASGFTFSSYTMHWVRQAPGKGLEWVSFISYDGNNKYYADSVKGRFTISRDNAKNSLYLQMNSLRAEDTAVYYCARTGWLGPFDYWGQGTLVTVSSGKPGSGKPGSGKPGSGKPGSEIVLTQSPGTLSLSPGERATLSCRASQSVGSSYLAWYQQKPGQAPRLLIYGAYSRATGIPDRFSGSGSGTDFTLTISRLEPEDFAVYYCQQYGSSPWTFGQGTKVEIK

SEQ ID NO: 29198 - protein, 121 aa, synthetic construct; identical to SEQ ID NO: 2516
  REGION 1..121: note = Description of Artificial Sequence: Synthetic polypeptide
  REGION 1..121: note = VH of XENP22594

SEQ ID NO: 29199 - protein, 5 aa, synthetic construct
  REGION 1..5: note = Description of Artificial Sequence: Synthetic peptide
  REGION 1..5: note = XENP22594 vhCDR1
DAWMS

SEQ ID NO: 29200 - protein, 19 aa, synthetic construct
  REGION 1..19: note = Description of Artificial Sequence: Synthetic peptide
  REGION 1..19: note = XENP22594 vhCDR2
EISTKANNHATYYAESVKG

SEQ ID NO: 29201 - protein, 10 aa, synthetic construct
  REGION 1..10: note = Description of Artificial Sequence: Synthetic peptide
  REGION 1..10: note = XENP22594 vhCDR3
LATWDWYFDV

SEQ ID NO: 29202 - protein, 111 aa, synthetic construct; identical to SEQ ID NO: 2421
  REGION 1..111: note = Description of Artificial Sequence: Synthetic polypeptide
  REGION 1..111: note = VL of XENP22594

SEQ ID NO: 29203 - protein, 15 aa, synthetic construct
  REGION 1..15: note = Description of Artificial Sequence: Synthetic peptide
  REGION 1..15: note = XENP22594 vlCDR1
RASQSVDYDGDSYMN

SEQ ID NO: 29204 - protein, 7 aa, synthetic construct
  REGION 1..7: note = Description of Artificial Sequence: Synthetic peptide
  REGION 1..7: note = XENP22594 vlCDR2
AASELES

SEQ ID NO: 29205 - protein, 9 aa, synthetic construct
  REGION 1..9: note = Description of Artificial Sequence: Synthetic peptide
  REGION 1..9: note = XENP22594 vlCDR3
QQSNEDPFT

SEQ ID NO: 29206 - protein, 118 aa, synthetic construct; identical to SEQ ID NO: 2646
  REGION 1..118: note = Description of Artificial Sequence: Synthetic polypeptide
  REGION 1..118: note = VH of XENP22656

SEQ ID NO: 29207 - protein, 5 aa, synthetic construct
  REGION 1..5: note = Description of Artificial Sequence: Synthetic peptide
  REGION 1..5: note = XENP22656 vhCDR1
DYFMH

SEQ ID NO: 29208 - protein, 17 aa, synthetic construct
  REGION 1..17: note = Description of Artificial Sequence: Synthetic peptide
  REGION 1..17: note = XENP22656 vhCDR2
WIDPELGDTEYAPKFQG

SEQ ID NO: 29209 - protein, 9 aa, synthetic construct
  REGION 1..9: note = Description of Artificial Sequence: Synthetic peptide
  REGION 1..9: note = XENP22656 vhCDR3
RGVYQALDY

SEQ ID NO: 29210 - protein, 107 aa, synthetic construct; identical to SEQ ID NO: 2661
  REGION 1..107: note = Description of Artificial Sequence: Synthetic polypeptide
  REGION 1..107: note = VL of XENP22656

SEQ ID NO: 29211 - protein, 11 aa, synthetic construct
  REGION 1..11: note = Description of Artificial Sequence: Synthetic peptide
  REGION 1..11: note = XENP22656 vlCDR1
QASQDIGNYLN

SEQ ID NO: 29212 - protein, 7 aa, synthetic construct
  REGION 1..7: note = Description of Artificial Sequence: Synthetic peptide
  REGION 1..7: note = XENP22656 vlCDR2
FTSYLHS

SEQ ID NO: 29213 - protein, 9 aa, synthetic construct
  REGION 1..9: note = Description of Artificial Sequence: Synthetic peptide
  REGION 1..9: note = XENP22656 vlCDR3
QQGNTLPYT

SEQ ID NO: 29214 - protein, 121 aa, synthetic construct
  REGION 1..121: note = Description of Artificial Sequence: Synthetic polypeptide
  REGION 1..121: note = VH of XENP21670
EVQLVESGGGLVQPGGSLRLSCAASGFTFDDAWMDWVRQAPGKGLEWVAEISTKANNHATYYAESVKGRFTISRDDSKSSVYLQMNSLRAEDTAVYYCTRLATWDWYFDVWGQGTTVTVSS

SEQ ID NO: 29215 - protein, 5 aa, synthetic construct
  REGION 1..5: note = Description of Artificial Sequence: Synthetic peptide
  REGION 1..5: note = XENP21670 vhCDR1
DAWMD

SEQ ID NO: 29216 - protein, 19 aa, synthetic construct
  REGION 1..19: note = Description of Artificial Sequence: Synthetic peptide
  REGION 1..19: note = XENP21670 vhCDR2
EISTKANNHATYYAESVKG

SEQ ID NO: 29217 - protein, 10 aa, synthetic construct
  REGION 1..10: note = Description of Artificial Sequence: Synthetic peptide
  REGION 1..10: note = XENP21670 vhCDR3
LATWDWYFDV

SEQ ID NO: 29218 - protein, 111 aa, synthetic construct
  REGION 1..111: note = Description of Artificial Sequence: Synthetic polypeptide
  REGION 1..111: note = VL of XENP21670
DTVLTQSPSSLSASVGDRVTITCRASQSVDYDGDSYMNWYQQKPGKPPKLLIYAASELESGIPARLSGSGSGTDFTLTISSLQPEDFATYYCQQSNEDPFTFGSGTKLEIK

SEQ ID NO: 29219 - protein, 15 aa, synthetic construct
  REGION 1..15: note = Description of Artificial Sequence: Synthetic peptide
  REGION 1..15: note = XENP21670 vlCDR1
RASQSVDYDGDSYMN

SEQ ID NO: 29220 - protein, 7 aa, synthetic construct
  REGION 1..7: note = Description of Artificial Sequence: Synthetic peptide
  REGION 1..7: note = XENP21670 vlCDR2
AASELES

SEQ ID NO: 29221 - protein, 9 aa, synthetic construct
  REGION 1..9: note = Description of Artificial Sequence: Synthetic peptide
  REGION 1..9: note = XENP21670 vlCDR3
QQSNEDPFT

SEQ ID NO: 29222 - protein, 121 aa, synthetic construct; identical to SEQ ID NO: 22262
  REGION 1..121: note = Description of Artificial Sequence: Synthetic polypeptide
  REGION 1..121: note = VH of XENP20930

SEQ ID NO: 29223 - protein, 5 aa, synthetic construct
  REGION 1..5: note = Description of Artificial Sequence: Synthetic peptide
  REGION 1..5: note = XENP20930 vhCDR1
DAWMD

SEQ ID NO: 29224 - protein, 19 aa, synthetic construct
  REGION 1..19: note = Description of Artificial Sequence: Synthetic peptide
  REGION 1..19: note = XENP20930 vhCDR2
EIRTKANNHATYYAESVKG

SEQ ID NO: 29225 - protein, 10 aa, synthetic construct
  REGION 1..10: note = Description of Artificial Sequence: Synthetic peptide
  REGION 1..10: note = XENP20930 vhCDR3
LANWDWYFDV

SEQ ID NO: 29226 - protein, 111 aa, synthetic construct; identical to SEQ ID NO: 22267
  REGION 1..111: note = Description of Artificial Sequence: Synthetic polypeptide
  REGION 1..111: note = VL of XENP20930

SEQ ID NO: 29227 - protein, 15 aa, synthetic construct
  REGION 1..15: note = Description of Artificial Sequence: Synthetic peptide
  REGION 1..15: note = XENP20930 vlCDR1
KASQSVDYDGDSYMN

SEQ ID NO: 29228 - protein, 7 aa, synthetic construct
  REGION 1..7: note = Description of Artificial Sequence: Synthetic peptide
  REGION 1..7: note = XENP20930 vlCDR2
AASNLES

SEQ ID NO: 29229 - protein, 9 aa, synthetic construct
  REGION 1..9: note = Description of Artificial Sequence: Synthetic peptide
  REGION 1..9: note = XENP20930 vlCDR3
QQSNEDPFT

SEQ ID NO: 29230 - protein, 118 aa, synthetic construct; identical to SEQ ID NO: 2706
  REGION 1..118: note = Description of Artificial Sequence: Synthetic polypeptide
  REGION 1..118: note = VH of XENP21921

SEQ ID NO: 29231 - protein, 5 aa, synthetic construct
  REGION 1..5: note = Description of Artificial Sequence: Synthetic peptide
  REGION 1..5: note = XENP21921 vhCDR1
HYFMH

SEQ ID NO: 29232 - protein, 17 aa, synthetic construct
  REGION 1..17: note = Description of Artificial Sequence: Synthetic peptide
  REGION 1..17: note = XENP21921 vhCDR2
WIDPYLGDTEYAPKFQG

SEQ ID NO: 29233 - protein, 9 aa, synthetic construct
  REGION 1..9: note = Description of Artificial Sequence: Synthetic peptide
  REGION 1..9: note = XENP21921 vhCDR3
RGVYQALDY

SEQ ID NO: 29234 - protein, 107 aa, synthetic construct; identical to SEQ ID NO: 2681
  REGION 1..107: note = Description of Artificial Sequence: Synthetic polypeptide
  REGION 1..107: note = VL of XENP21921

SEQ ID NO: 29235 - protein, 11 aa, synthetic construct
  REGION 1..11: note = Description of Artificial Sequence: Synthetic peptide
  REGION 1..11: note = XENP21921 vlCDR1
QASQDIGNYLN

SEQ ID NO: 29236 - protein, 7 aa, synthetic construct
  REGION 1..7: note = Description of Artificial Sequence: Synthetic peptide
  REGION 1..7: note = XENP21921 vlCDR2
FTSYLHS

SEQ ID NO: 29237 - protein, 9 aa, synthetic construct
  REGION 1..9: note = Description of Artificial Sequence: Synthetic peptide
  REGION 1..9: note = XENP21921 vlCDR3
QQGNTLPYT

SEQ ID NO: 29238 - protein, 118 aa, synthetic construct; identical to SEQ ID NO: 2686
  REGION 1..118: note = Description of Artificial Sequence: Synthetic polypeptide
  REGION 1..118: note = VH of XENP20847

SEQ ID NO: 29239 - protein, 5 aa, synthetic construct
  REGION 1..5: note = Description of Artificial Sequence: Synthetic peptide
  REGION 1..5: note = XENP20847 vhCDR1
DYYMH

SEQ ID NO: 29240 - protein, 17 aa, synthetic construct
  REGION 1..17: note = Description of Artificial Sequence: Synthetic peptide
  REGION 1..17: note = XENP20847 vhCDR2
WIDPENGDTEYAPKFQG

SEQ ID NO: 29241 - protein, 9 aa, synthetic construct
  REGION 1..9: note = Description of Artificial Sequence: Synthetic peptide
  REGION 1..9: note = XENP20847 vhCDR3
RGVRQALDY

SEQ ID NO: 29242 - protein, 107 aa, synthetic construct; identical to SEQ ID NO: 2881
  REGION 1..107: note = Description of Artificial Sequence: Synthetic polypeptide
  REGION 1..107: note = VL of XENP20847

SEQ ID NO: 29243 - protein, 11 aa, synthetic construct
  REGION 1..11: note = Description of Artificial Sequence: Synthetic peptide
  REGION 1..11: note = XENP20847 vlCDR1
QASQDIGNYLN

SEQ ID NO: 29244 - protein, 7 aa, synthetic construct
  REGION 1..7: note = Description of Artificial Sequence: Synthetic peptide
  REGION 1..7: note = XENP20847 vlCDR2
YTSRLHS

SEQ ID NO: 29245 - protein, 9 aa, synthetic construct
  REGION 1..9: note = Description of Artificial Sequence: Synthetic peptide
  REGION 1..9: note = XENP20847 vlCDR3
QQGNTLPYT

SEQ ID NO: 29246 - protein, 118 aa, synthetic construct; identical to SEQ ID NO: 2686
  REGION 1..118: note = Description of Artificial Sequence: Synthetic polypeptide
  REGION 1..118: note = VH of XENP21372

SEQ ID NO: 29247 - protein, 5 aa, synthetic construct
  REGION 1..5: note = Description of Artificial Sequence: Synthetic peptide
  REGION 1..5: note = XENP21372 vhCDR1
DYYMH

SEQ ID NO: 29248 - protein, 17 aa, synthetic construct
  REGION 1..17: note = Description of Artificial Sequence: Synthetic peptide
  REGION 1..17: note = XENP21372 vhCDR2
WIDPENGDTEYAPKFQG

SEQ ID NO: 29249 - protein, 9 aa, synthetic construct
  REGION 1..9: note = Description of Artificial Sequence: Synthetic peptide
  REGION 1..9: note = XENP21372 vhCDR3
RGVRQALDY

SEQ ID NO: 29250 - protein, 107 aa, synthetic construct
  REGION 1..107: note = Description of Artificial Sequence: Synthetic polypeptide
  REGION 1..107: note = VL of XENP21372
DIQMTQSPAFLSVTPGEKVTITCQASQDIGNHLNWFQQKPDQTVKLLIYYTSRLHSGVPSRFSGSGSGTDYTFTISSLEAEDAATYFCQQGNTLPYTFGGGTKVEIK

SEQ ID NO: 29251 - protein, 11 aa, synthetic construct
  REGION 1..11: note = Description of Artificial Sequence: Synthetic peptide
  REGION 1..11: note = XENP21372 vlCDR1
QASQDIGNHLN

SEQ ID NO: 29252 - protein, 7 aa, synthetic construct
  REGION 1..7: note = Description of Artificial Sequence: Synthetic peptide
  REGION 1..7: note = XENP21372 vlCDR2
YTSRLHS

SEQ ID NO: 29253 - protein, 9 aa, synthetic construct
  REGION 1..9: note = Description of Artificial Sequence: Synthetic peptide
  REGION 1..9: note = XENP21372 vlCDR3
QQGNTLPYT

SEQ ID NO: 29254 - protein, 118 aa, synthetic construct; identical to SEQ ID NO: 2686
  REGION 1..118: note = Description of Artificial Sequence: Synthetic polypeptide
  REGION 1..118: note = VH of XENP21394

SEQ ID NO: 29255 - protein, 5 aa, synthetic construct
  REGION 1..5: note = Description of Artificial Sequence: Synthetic peptide
  REGION 1..5: note = XENP21394 vhCDR1
DYYMH

SEQ ID NO: 29256 - protein, 17 aa, synthetic construct
  REGION 1..17: note = Description of Artificial Sequence: Synthetic peptide
  REGION 1..17: note = XENP21394 vhCDR2
WIDPENGDTEYAPKFQG

SEQ ID NO: 29257 - protein, 9 aa, synthetic construct
  REGION 1..9: note = Description of Artificial Sequence: Synthetic peptide
  REGION 1..9: note = XENP21394 vhCDR3
RGVRQALDY

SEQ ID NO: 29258 - protein, 107 aa, synthetic construct
  REGION 1..107: note = Description of Artificial Sequence: Synthetic polypeptide
  REGION 1..107: note = VL of XENP21394
DIQMTQSPAFLSVTPGEKVTITCQASQDIGNYLNWFQQKPDQTVKLLIYYTSHLHSGVPSRFSGSGSGTDYTFTISSLEAEDAATYFCQQGNTLPYTFGGGTKVEIK

SEQ ID NO: 29259 - protein, 11 aa, synthetic construct
  REGION 1..11: note = Description of Artificial Sequence: Synthetic peptide
  REGION 1..11: note = XENP21394 vlCDR1
QASQDIGNYLN

SEQ ID NO: 29260 - protein, 7 aa, synthetic construct
  REGION 1..7: note = Description of Artificial Sequence: Synthetic peptide
  REGION 1..7: note = XENP21394 vlCDR2
YTSHLHS

SEQ ID NO: 29261 - protein, 9 aa, synthetic construct
  REGION 1..9: note = Description of Artificial Sequence: Synthetic peptide
  REGION 1..9: note = XENP21394 vlCDR3
QQGNTLPYT

SEQ ID NO: 29262 - protein, 118 aa, synthetic construct; identical to SEQ ID NO: 2686
  REGION 1..118: note = Description of Artificial Sequence: Synthetic polypeptide
  REGION 1..118: note = VH of XENP21401

SEQ ID NO: 29263 - protein, 5 aa, synthetic construct
  REGION 1..5: note = Description of Artificial Sequence: Synthetic peptide
  REGION 1..5: note = XENP21401 vhCDR1
DYYMH

SEQ ID NO: 29264 - protein, 17 aa, synthetic construct
  REGION 1..17: note = Description of Artificial Sequence: Synthetic peptide
  REGION 1..17: note = XENP21401 vhCDR2
WIDPENGDTEYAPKFQG

SEQ ID NO: 29265 - protein, 9 aa, synthetic construct
  REGION 1..9: note = Description of Artificial Sequence: Synthetic peptide
  REGION 1..9: note = XENP21401 vhCDR3
RGVRQALDY

SEQ ID NO: 29266 - protein, 107 aa, synthetic construct; identical to SEQ ID NO: 2901
  REGION 1..107: note = Description of Artificial Sequence: Synthetic polypeptide
  REGION 1..107: note = VL of XENP21401

SEQ ID NO: 29267 - protein, 11 aa, synthetic construct
  REGION 1..11: note = Description of Artificial Sequence: Synthetic peptide
  REGION 1..11: note = XENP21401 vlCDR1
QASQDIGNYLN

SEQ ID NO: 29268 - protein, 7 aa, synthetic construct
  REGION 1..7: note = Description of Artificial Sequence: Synthetic peptide
  REGION 1..7: note = XENP21401 vlCDR2
YTSYLHS

SEQ ID NO: 29269 - protein, 9 aa, synthetic construct
  REGION 1..9: note = Description of Artificial Sequence: Synthetic peptide
  REGION 1..9: note = XENP21401 vlCDR3
QQGNTLPYT

SEQ ID NO: 29270 - protein, 118 aa, synthetic construct; identical to SEQ ID NO: 2686
  REGION 1..118: note = Description of Artificial Sequence: Synthetic polypeptide
  REGION 1..118: note = VH of XENP20847

SEQ ID NO: 29271 - protein, 5 aa, synthetic construct
  REGION 1..5: note = Description of Artificial Sequence: Synthetic peptide
  REGION 1..5: note = XENP20847 vhCDR1
DYYMH

SEQ ID NO: 29272 - protein, 17 aa, synthetic construct
  REGION 1..17: note = Description of Artificial Sequence: Synthetic peptide
  REGION 1..17: note = XENP20847 vhCDR2
WIDPENGDTEYAPKFQG

SEQ ID NO: 29273 - protein, 9 aa, synthetic construct
  REGION 1..9: note = Description of Artificial Sequence: Synthetic peptide
  REGION 1..9: note = XENP20847 vhCDR3
RGVRQALDY

SEQ ID NO: 29274 - protein, 107 aa, synthetic construct; identical to SEQ ID NO: 2881
  REGION 1..107: note = Description of Artificial Sequence: Synthetic polypeptide
  REGION 1..107: note = VL of XENP20847

SEQ ID NO: 29275 - protein, 11 aa, synthetic construct
  REGION 1..11: note = Description of Artificial Sequence: Synthetic peptide
  REGION 1..11: note = XENP20847 vlCDR1
QASQDIGNYLN

SEQ ID NO: 29276 - protein, 7 aa, synthetic construct
  REGION 1..7: note = Description of Artificial Sequence: Synthetic peptide
  REGION 1..7: note = XENP20847 vlCDR2
YTSRLHS

SEQ ID NO: 29277 - protein, 9 aa, synthetic construct
  REGION 1..9: note = Description of Artificial Sequence: Synthetic peptide
  REGION 1..9: note = XENP20847 vlCDR3
QQGNTLPYT

SEQ ID NO: 29278 - protein, 121 aa, synthetic construct; identical to SEQ ID NO: 29214
  REGION 1..121: note = Description of Artificial Sequence: Synthetic polypeptide
  REGION 1..121: note = VH of XENP21670

SEQ ID NO: 29279 - protein, 5 aa, synthetic construct
  REGION 1..5: note = Description of Artificial Sequence: Synthetic peptide
  REGION 1..5: note = XENP21670 vhCDR1
DAWMD

SEQ ID NO: 29280 - protein, 19 aa, synthetic construct
  REGION 1..19: note = Description of Artificial Sequence: Synthetic peptide
  REGION 1..19: note = XENP21670 vhCDR2
EISTKANNHATYYAESVKG

SEQ ID NO: 29281 - protein, 10 aa, synthetic construct
  REGION 1..10: note = Description of Artificial Sequence: Synthetic peptide
  REGION 1..10: note = XENP21670 vhCDR3
LATWDWYFDV

SEQ ID NO: 29282 - protein, 111 aa, synthetic construct; identical to SEQ ID NO: 29218
  REGION 1..111: note = Description of Artificial Sequence: Synthetic polypeptide
  REGION 1..111: note = VL of XENP21670

SEQ ID NO: 29283 - protein, 15 aa, synthetic construct
  REGION 1..15: note = Description of Artificial Sequence: Synthetic peptide
  REGION 1..15: note = XENP21670 vlCDR1
RASQSVDYDGDSYMN

SEQ ID NO: 29284 - protein, 7 aa, synthetic construct
  REGION 1..7: note = Description of Artificial Sequence: Synthetic peptide
  REGION 1..7: note = XENP21670 vlCDR2
AASELES

SEQ ID NO: 29285 - protein, 9 aa, synthetic construct
  REGION 1..9: note = Description of Artificial Sequence: Synthetic peptide
  REGION 1..9: note = XENP21670 vlCDR3
QQSNEDPFT

SEQ ID NO: 29286 - protein, 121 aa, synthetic construct
  REGION 1..121: note = Description of Artificial Sequence: Synthetic polypeptide
  REGION 1..121: note = VH of XENP21892
EVQLVESGGGLVQPGGSLRLSCAASGFTFDDAWMDWVRQAPGKGLEWVAEISTKAYNHATYYAESVKGRFTISRDDSKSSVYLQMNSLRAEDTAVYYCTRLATWDWYFDVWGQGTTVTVSS

SEQ ID NO: 29287 - protein, 5 aa, synthetic construct
  REGION 1..5: note = Description of Artificial Sequence: Synthetic peptide
  REGION 1..5: note = XENP21892 vhCDR1
DAWMD

SEQ ID NO: 29288 - protein, 19 aa, synthetic construct
  REGION 1..19: note = Description of Artificial Sequence: Synthetic peptide
  REGION 1..19: note = XENP21892 vhCDR2
EISTKAYNHATYYAESVKG

SEQ ID NO: 29289 - protein, 10 aa, synthetic construct
  REGION 1..10: note = Description of Artificial Sequence: Synthetic peptide
  REGION 1..10: note = XENP21892 vhCDR3
LATWDWYFDV

SEQ ID NO: 29290 - protein, 111 aa, synthetic construct; identical to SEQ ID NO: 22277
  REGION 1..111: note = Description of Artificial Sequence: Synthetic polypeptide
  REGION 1..111: note = VL of XENP21892

SEQ ID NO: 29291 - protein, 15 aa, synthetic construct
  REGION 1..15: note = Description of Artificial Sequence: Synthetic peptide
  REGION 1..15: note = XENP21892 vlCDR1
RASQSVDYDGDSYMN

SEQ ID NO: 29292 - protein, 7 aa, synthetic construct
  REGION 1..7: note = Description of Artificial Sequence: Synthetic peptide
  REGION 1..7: note = XENP21892 vlCDR2
AASNLES

SEQ ID NO: 29293 - protein, 9 aa, synthetic construct
  REGION 1..9: note = Description of Artificial Sequence: Synthetic peptide
  REGION 1..9: note = XENP21892 vlCDR3
QQSNEDPFT

SEQ ID NO: 29294 - protein, 121 aa, synthetic construct; identical to SEQ ID NO: 29286
  REGION 1..121: note = Description of Artificial Sequence: Synthetic polypeptide
  REGION 1..121: note = VH of XENP21893

SEQ ID NO: 29295 - protein, 5 aa, synthetic construct
  REGION 1..5: note = Description of Artificial Sequence: Synthetic peptide
  REGION 1..5: note = XENP21893 vhCDR1
DAWMD

SEQ ID NO: 29296 - protein, 19 aa, synthetic construct
  REGION 1..19: note = Description of Artificial Sequence: Synthetic peptide
  REGION 1..19: note = XENP21893 vhCDR2
EISTKAYNHATYYAESVKG

SEQ ID NO: 29297 - protein, 10 aa, synthetic construct
  REGION 1..10: note = Description of Artificial Sequence: Synthetic peptide
  REGION 1..10: note = XENP21893 vhCDR3
LATWDWYFDV

SEQ ID NO: 29298 - protein, 111 aa, synthetic construct; identical to SEQ ID NO: 29218
  REGION 1..111: note = Description of Artificial Sequence: Synthetic polypeptide
  REGION 1..111: note = VL of XENP21893

SEQ ID NO: 29299 - protein, 15 aa, synthetic construct
  REGION 1..15: note = Description of Artificial Sequence: Synthetic peptide
  REGION 1..15: note = XENP21893 vlCDR1
RASQSVDYDGDSYMN

SEQ ID NO: 29300 - protein, 7 aa, synthetic construct
  REGION 1..7: note = Description of Artificial Sequence: Synthetic peptide
  REGION 1..7: note = XENP21893 vlCDR2
AASELES

SEQ ID NO: 29301 - protein, 9 aa, synthetic construct
  REGION 1..9: note = Description of Artificial Sequence: Synthetic peptide
  REGION 1..9: note = XENP21893 vlCDR3
QQSNEDPFT

SEQ ID NO: 29302 - protein, 121 aa, synthetic construct; identical to SEQ ID NO: 29286
  REGION 1..121: note = Description of Artificial Sequence: Synthetic polypeptide
  REGION 1..121: note = VH of XENP21894

SEQ ID NO: 29303 - protein, 5 aa, synthetic construct
  REGION 1..5: note = Description of Artificial Sequence: Synthetic peptide
  REGION 1..5: note = XENP21894 vhCDR1
DAWMD

SEQ ID NO: 29304 - protein, 19 aa, synthetic construct
  REGION 1..19: note = Description of Artificial Sequence: Synthetic peptide
  REGION 1..19: note = XENP21894 vhCDR2
EISTKAYNHATYYAESVKG

SEQ ID NO: 29305 - protein, 10 aa, synthetic construct
  REGION 1..10: note = Description of Artificial Sequence: Synthetic peptide
  REGION 1..10: note = XENP21894 vhCDR3
LATWDWYFDV

SEQ ID NO: 29306 - protein, 111 aa, synthetic construct
  REGION 1..111: note = Description of Artificial Sequence: Synthetic polypeptide
  REGION 1..111: note = VL of XENP21894
DTVLTQSPSSLSASVGDRVTITCRASQSVDHDGDSYMNWYQQKPGKPPKLLIYAASELESGIPARLSGSGSGTDFTLTISSLQPEDFATYYCQQSNEDPFTFGSGTKLEIK

SEQ ID NO: 29307 - protein, 15 aa, synthetic construct
  REGION 1..15: note = Description of Artificial Sequence: Synthetic peptide
  REGION 1..15: note = XENP21894 vlCDR1
RASQSVDHDGDSYMN

SEQ ID NO: 29308 - protein, 7 aa, synthetic construct
  REGION 1..7: note = Description of Artificial Sequence: Synthetic peptide
  REGION 1..7: note = XENP21894 vlCDR2
AASELES

SEQ ID NO: 29309 - protein, 9 aa, synthetic construct
  REGION 1..9: note = Description of Artificial Sequence: Synthetic peptide
  REGION 1..9: note = XENP21894 vlCDR3
QQSNEDPFT

SEQ ID NO: 29310 - protein, 113 aa, synthetic construct; identical to SEQ ID NO: 3626
  REGION 1..113: note = Description of Artificial Sequence: Synthetic polypeptide
  REGION 1..113: note = VH of XENP21503

SEQ ID NO: 29311 - protein, 4 aa, synthetic construct
  REGION 1..4: note = Description of Artificial Sequence: Synthetic peptide
  REGION 1..4: note = XENP21503 vhCDR1
SFDM

SEQ ID NO: 29312 - protein, 17 aa, synthetic construct
  REGION 1..17: note = Description of Artificial Sequence: Synthetic peptide
  REGION 1..17: note = XENP21503 vhCDR2
YISSDGASTFYPDTMKG

SEQ ID NO: 29313 - protein, 4 aa, synthetic construct
  REGION 1..4: note = Description of Artificial Sequence: Synthetic peptide
  REGION 1..4: note = XENP21503 vhCDR3
LGAY

SEQ ID NO: 29314 - protein, 112 aa, synthetic construct; identical to SEQ ID NO: 3701
  REGION 1..112: note = Description of Artificial Sequence: Synthetic polypeptide
  REGION 1..112: note = VL of XENP21503

SEQ ID NO: 29315 - protein, 16 aa, synthetic construct
  REGION 1..16: note = Description of Artificial Sequence: Synthetic peptide
  REGION 1..16: note = XENP21503 vlCDR1
KSSQSLLDSDGKTYLN

SEQ ID NO: 29316 - protein, 6 aa, synthetic construct
  REGION 1..6: note = Description of Artificial Sequence: Synthetic peptide
  REGION 1..6: note = XENP21503 vlCDR2
VSKLDS

SEQ ID NO: 29317 - protein, 9 aa, synthetic construct
  REGION 1..9: note = Description of Artificial Sequence: Synthetic peptide
  REGION 1..9: note = XENP21503 vlCDR3
WQGTHFPYT

SEQ ID NO: 29318 - protein, 113 aa, synthetic construct; identical to SEQ ID NO: 3626
  REGION 1..113: note = Description of Artificial Sequence: Synthetic polypeptide
  REGION 1..113: note = VH of XENP21492

SEQ ID NO: 29319 - protein, 5 aa, synthetic construct
  REGION 1..5: note = Description of Artificial Sequence: Synthetic peptide
  REGION 1..5: note = XENP21492 vhCDR1
SFDMS

SEQ ID NO: 29320 - protein, 17 aa, synthetic construct
  REGION 1..17: note = Description of Artificial Sequence: Synthetic peptide
  REGION 1..17: note = XENP21492 vhCDR2
YISSDGASTFYPDTMKG

SEQ ID NO: 29321 - protein, 4 aa, synthetic construct
  REGION 1..4: note = Description of Artificial Sequence: Synthetic peptide
  REGION 1..4: note = XENP21492 vhCDR3
LGAY

SEQ ID NO: 29322 - protein, 111 aa, synthetic construct; identical to SEQ ID NO: 3631
  REGION 1..111: note = Description of Artificial Sequence: Synthetic polypeptide
  REGION 1..111: note = VL of XENP21492

SEQ ID NO: 29323 - protein, 14 aa, synthetic construct
  REGION 1..14: note = Description of Artificial Sequence: Synthetic peptide
  REGION 1..14: note = XENP21492 vlCDR1
RASESVEYYGTSLQ

SEQ ID NO: 29324 - protein, 7 aa, synthetic construct
  REGION 1..7: note = Description of Artificial Sequence: Synthetic peptide
  REGION 1..7: note = XENP21492 vlCDR2
AASNVES

SEQ ID NO: 29325 - protein, 9 aa, synthetic construct
  REGION 1..9: note = Description of Artificial Sequence: Synthetic peptide
  REGION 1..9: note = XENP21492 vlCDR3
QQSRKVPWT

SEQ ID NO: 29326 - protein, 117 aa, synthetic construct; identical to SEQ ID NO: 3366
  REGION 1..117: note = Description of Artificial Sequence: Synthetic polypeptide
  REGION 1..117: note = VH of XENP21189

SEQ ID NO: 29327 - protein, 5 aa, synthetic construct
  REGION 1..5: note = Description of Artificial Sequence: Synthetic peptide
  REGION 1..5: note = XENP21189 vhCDR1
GYGVN

SEQ ID NO: 29328 - protein, 16 aa, synthetic construct
  REGION 1..16: note = Description of Artificial Sequence: Synthetic peptide
  REGION 1..16: note = XENP21189 vhCDR2
MIWGDGSTDYNSALKS

SEQ ID NO: 29329 - protein, 9 aa, synthetic construct
  REGION 1..9: note = Description of Artificial Sequence: Synthetic peptide
  REGION 1..9: note = XENP21189 vhCDR3
SYYTSDEDY

SEQ ID NO: 29330 - protein, 112 aa, synthetic construct; identical to SEQ ID NO: 3511
  REGION 1..112: note = Description of Artificial Sequence: Synthetic polypeptide
  REGION 1..112: note = VL of XENP21189

SEQ ID NO: 29331 - protein, 17 aa, synthetic construct
  REGION 1..17: note = Description of Artificial Sequence: Synthetic peptide
  REGION 1..17: note = XENP21189 vlCDR1
KSSQSLLNSRTRKNYLA

SEQ ID NO: 29332 - protein, 7 aa, synthetic construct
  REGION 1..7: note = Description of Artificial Sequence: Synthetic peptide
  REGION 1..7: note = XENP21189 vlCDR2
WASTRES

SEQ ID NO: 29333 - protein, 8 aa, synthetic construct
  REGION 1..8: note = Description of Artificial Sequence: Synthetic peptide
  REGION 1..8: note = XENP21189 vlCDR3
KQSYSLRT

SEQ ID NO: 29334 - protein, 117 aa, synthetic construct; identical to SEQ ID NO: 3636
  REGION 1..117: note = Description of Artificial Sequence: Synthetic polypeptide
  REGION 1..117: note = VH of XENP21493

SEQ ID NO: 29335 - protein, 5 aa, synthetic construct
  REGION 1..5: note = Description of Artificial Sequence: Synthetic peptide
  REGION 1..5: note = XENP21493 vhCDR1
GYGVN

SEQ ID NO: 29336 - protein, 16 aa, synthetic construct
  REGION 1..16: note = Description of Artificial Sequence: Synthetic peptide
  REGION 1..16: note = XENP21493 vhCDR2
MIWGDGSTDYNSALKS

SEQ ID NO: 29337 - protein, 9 aa, synthetic construct
  REGION 1..9: note = Description of Artificial Sequence: Synthetic peptide
  REGION 1..9: note = XENP21493 vhCDR3
SYYTSDEDY

SEQ ID NO: 29338 - protein, 107 aa, synthetic construct; identical to SEQ ID NO: 3641
  REGION 1..107: note = Description of Artificial Sequence: Synthetic polypeptide
  REGION 1..107: note = VL of XENP21493

SEQ ID NO: 29339 - protein, 11 aa, synthetic construct
  REGION 1..11: note = Description of Artificial Sequence: Synthetic peptide
  REGION 1..11: note = XENP21493 vlCDR1
KASQNVGSNVA

SEQ ID NO: 29340 - protein, 7 aa, synthetic construct
  REGION 1..7: note = Description of Artificial Sequence: Synthetic peptide
  REGION 1..7: note = XENP21493 vlCDR2
SASFRYS

SEQ ID NO: 29341 - protein, 9 aa, synthetic construct
  REGION 1..9: note = Description of Artificial Sequence: Synthetic peptide
  REGION 1..9: note = XENP21493 vlCDR3
QQYNSYPYT

SEQ ID NO: 29342 - protein, 117 aa, synthetic construct; identical to SEQ ID NO: 3646
  REGION 1..117: note = Description of Artificial Sequence: Synthetic polypeptide
  REGION 1..117: note = VH of XENP21494

SEQ ID NO: 29343 - protein, 5 aa, synthetic construct
  REGION 1..5: note = Description of Artificial Sequence: Synthetic peptide
  REGION 1..5: note = XENP21494 vhCDR1
SYGVH

SEQ ID NO: 29344 - protein, 16 aa, synthetic construct
  REGION 1..16: note = Description of Artificial Sequence: Synthetic peptide
  REGION 1..16: note = XENP21494 vhCDR2
VIWSGGSTEYNAAFIS

SEQ ID NO: 29345 - protein, 9 aa, synthetic construct
  REGION 1..9: note = Description of Artificial Sequence: Synthetic peptide
  REGION 1..9: note = XENP21494 vhCDR3
GGLLSPFDY

SEQ ID NO: 29346 - protein, 111 aa, synthetic construct; identical to SEQ ID NO: 3631
  REGION 1..111: note = Description of Artificial Sequence: Synthetic polypeptide
  REGION 1..111: note = VL of XENP21494

SEQ ID NO: 29347 - protein, 15 aa, synthetic construct
  REGION 1..15: note = Description of Artificial Sequence: Synthetic peptide
  REGION 1..15: note = XENP21494 vlCDR1
RASESVEYYGTSLMQ

SEQ ID NO: 29348 - protein, 7 aa, synthetic construct
  REGION 1..7: note = Description of Artificial Sequence: Synthetic peptide
  REGION 1..7: note = XENP21494 vlCDR2
AASNVES

SEQ ID NO: 29349 - protein, 9 aa, synthetic construct
  REGION 1..9: note = Description of Artificial Sequence: Synthetic peptide
  REGION 1..9: note = XENP21494 vlCDR3
QQSRKVPWT

SEQ ID NO: 29350 - protein, 123 aa, synthetic construct; identical to SEQ ID NO: 3656
  REGION 1..123: note = Description of Artificial Sequence: Synthetic polypeptide
  REGION 1..123: note = VH of XENP21495

SEQ ID NO: 29351 - protein, 5 aa, synthetic construct
  REGION 1..5: note = Description of Artificial Sequence: Synthetic peptide
  REGION 1..5: note = XENP21495 vhCDR1
RYWMS

SEQ ID NO: 29352 - protein, 17 aa, synthetic construct
  REGION 1..17: note = Description of Artificial Sequence: Synthetic peptide
  REGION 1..17: note = XENP21495 vhCDR2
EINPDSSTINYTPSLKD

SEQ ID NO: 29353 - protein, 14 aa, synthetic construct
  REGION 1..14: note = Description of Artificial Sequence: Synthetic peptide
  REGION 1..14: note = XENP21495 vhCDR3
PNGYYVGTIFPFAY

SEQ ID NO: 29354 - protein, 110 aa, synthetic construct
  REGION 1..110: note = Description of Artificial Sequence: Synthetic polypeptide
  REGION 1..110: note = VL of XENP21495
QAVVTQESALTTSPGETVTLTCRSSTGAVTTSNYANWVQEKPDHLFTGLIGGTNNRAPGVPARFSGSLIGDKAALTITGAQTEDEAIYFCALWYSNHWVFGGGTKLTVLG

SEQ ID NO: 29355 - protein, 14 aa, synthetic construct
  REGION 1..14: note = Description of Artificial Sequence: Synthetic peptide
  REGION 1..14: note = XENP21495 vlCDR1
RSSTGAVTTSNYAN

SEQ ID NO: 29356 - protein, 7 aa, synthetic construct
  REGION 1..7: note = Description of Artificial Sequence: Synthetic peptide
  REGION 1..7: note = XENP21495 vlCDR2
GTNNRAP

SEQ ID NO: 29357 - protein, 9 aa, synthetic construct
  REGION 1..9: note = Description of Artificial Sequence: Synthetic peptide
  REGION 1..9: note = XENP21495 vlCDR3
ALWYSNHWV

SEQ ID NO: 29358 - protein, 118 aa, synthetic construct; identical to SEQ ID NO: 3666
  REGION 1..118: note = Description of Artificial Sequence: Synthetic polypeptide
  REGION 1..118: note = VH of XENP21496

SEQ ID NO: 29359 - protein, 5 aa, synthetic construct
  REGION 1..5: note = Description of Artificial Sequence: Synthetic peptide
  REGION 1..5: note = XENP21496 vhCDR1
SYAVN

SEQ ID NO: 29360 - protein, 16 aa, synthetic construct
  REGION 1..16: note = Description of Artificial Sequence: Synthetic peptide
  REGION 1..16: note = XENP21496 vhCDR2
VIWSGGSTDYNAAFIS

SEQ ID NO: 29361 - protein, 10 aa, synthetic construct
  REGION 1..10: note = Description of Artificial Sequence: Synthetic peptide
  REGION 1..10: note = XENP21496 vhCDR3
LYYRYDGFDY

SEQ ID NO: 29362 - protein, 107 aa, synthetic construct; identical to SEQ ID NO: 25517
  REGION 1..107: note = Description of Artificial Sequence: Synthetic polypeptide
  REGION 1..107: note = VL of XENP21496

SEQ ID NO: 29363 - protein, 11 aa, synthetic construct
  REGION 1..11: note = Description of Artificial Sequence: Synthetic peptide
  REGION 1..11: note = XENP21496 vlCDR1
KASQNVGTHVA

SEQ ID NO: 29364 - protein, 7 aa, synthetic construct
  REGION 1..7: note = Description of Artificial Sequence: Synthetic peptide
  REGION 1..7: note = XENP21496 vlCDR2
SASYRYS

SEQ ID NO: 29365 - protein, 9 aa, synthetic construct
  REGION 1..9: note = Description of Artificial Sequence: Synthetic peptide
  REGION 1..9: note = XENP21496 vlCDR3
QQYNSYPLT

SEQ ID NO: 29366 - protein, 118 aa, synthetic construct; identical to SEQ ID NO: 3676
  REGION 1..118: note = Description of Artificial Sequence: Synthetic polypeptide
  REGION 1..118: note = VH of XENP21501

SEQ ID NO: 29367 - protein, 5 aa, synthetic construct
  REGION 1..5: note = Description of Artificial Sequence: Synthetic peptide
  REGION 1..5: note = XENP21501 vhCDR1
SYAVN

SEQ ID NO: 29368 - protein, 16 aa, synthetic construct
  REGION 1..16: note = Description of Artificial Sequence: Synthetic peptide
  REGION 1..16: note = XENP21501 vhCDR2
VIWSGGSTDYNAAFIS

SEQ ID NO: 29369 - protein, 10 aa, synthetic construct
  REGION 1..10: note = Description of Artificial Sequence: Synthetic peptide
  REGION 1..10: note = XENP21501 vhCDR3
LYYRYDGFDY

SEQ ID NO: 29370 - protein, 107 aa, synthetic construct; identical to SEQ ID NO: 25517
  REGION 1..107: note = Description of Artificial Sequence: Synthetic polypeptide
  REGION 1..107: note = VL of XENP21501

SEQ ID NO: 29371 - protein, 11 aa, synthetic construct
  REGION 1..11: note = Description of Artificial Sequence: Synthetic peptide
  REGION 1..11: note = XENP21501 vlCDR1
KASQNVGTHVA

SEQ ID NO: 29372 - protein, 7 aa, synthetic construct
  REGION 1..7: note = Description of Artificial Sequence: Synthetic peptide
  REGION 1..7: note = XENP21501 vlCDR2
SASYRYS

SEQ ID NO: 29373 - protein, 9 aa, synthetic construct
  REGION 1..9: note = Description of Artificial Sequence: Synthetic peptide
  REGION 1..9: note = XENP21501 vlCDR3
QQYNSYPLT

SEQ ID NO: 29374 - protein, 117 aa, synthetic construct; identical to SEQ ID NO: 3686
  REGION 1..117: note = Description of Artificial Sequence: Synthetic polypeptide
  REGION 1..117: note = VH of XENP21502

SEQ ID NO: 29375 - protein, 5 aa, synthetic construct
  REGION 1..5: note = Description of Artificial Sequence: Synthetic peptide
  REGION 1..5: note = XENP21502 vhCDR1
RYAMS

SEQ ID NO: 29376 - protein, 16 aa, synthetic construct
  REGION 1..16: note = Description of Artificial Sequence: Synthetic peptide
  REGION 1..16: note = XENP21502 vhCDR2
SISSGGSTYYPDSVQG

SEQ ID NO: 29377 - protein, 9 aa, synthetic construct
  REGION 1..9: note = Description of Artificial Sequence: Synthetic peptide
  REGION 1..9: note = XENP21502 vhCDR3
GDYEGYFDY

SEQ ID NO: 29378 - protein, 113 aa, synthetic construct; identical to SEQ ID NO: 3691
  REGION 1..113: note = Description of Artificial Sequence: Synthetic polypeptide
  REGION 1..113: note = VL of XENP21502

SEQ ID NO: 29379 - protein, 17 aa, synthetic construct
  REGION 1..17: note = Description of Artificial Sequence: Synthetic peptide
  REGION 1..17: note = XENP21502 vlCDR1
KSSQSLLNSINQKNYLA

SEQ ID NO: 29380 - protein, 7 aa, synthetic construct
  REGION 1..7: note = Description of Artificial Sequence: Synthetic peptide
  REGION 1..7: note = XENP21502 vlCDR2
FASTRES

SEQ ID NO: 29381 - protein, 9 aa, synthetic construct
  REGION 1..9: note = Description of Artificial Sequence: Synthetic peptide
  REGION 1..9: note = XENP21502 vlCDR3
QQHYSTPLT

SEQ ID NO: 29382 - protein, 118 aa, synthetic construct [sequence omitted]

SEQ ID NO: 29383 - protein, 5 aa, synthetic construct
  REGION 1..5: note = Description of Artificial Sequence: Synthetic peptide
  REGION 1..5: note = XENP016434 vhCDR1
DSWIH

SEQ ID NO: 29384 - protein, 17 aa, synthetic construct
  REGION 1..17: note = Description of Artificial Sequence: Synthetic peptide
  REGION 1..17: note = XENP016434 vhCDR2
WISPYGGSTYYADSVKG

SEQ ID NO: 29385 - protein, 9 aa, synthetic construct
  REGION 1..9: note = Description of Artificial Sequence: Synthetic peptide
  REGION 1..9: note = XENP016434 vhCDR3
RHWPGGFDY

SEQ ID NO: 29386 - protein, 447 aa, synthetic construct; identical to SEQ ID NO: 27506
  REGION 1..447: note = Description of Artificial Sequence: Synthetic polypeptide
  REGION 1..447: note = XENP016434 Full length HC

SEQ ID NO: 29387 - protein, 107 aa, synthetic construct [sequence omitted]

SEQ ID NO: 29388 - protein, 11 aa, synthetic construct
  REGION 1..11: note = Description of Artificial Sequence: Synthetic peptide
  REGION 1..11: note = XENP016434 vlCDR1
RASQDVSTAVA

SEQ ID NO: 29389 - protein, 7 aa, synthetic construct
  REGION 1..7: note = Description of Artificial Sequence: Synthetic peptide
  REGION 1..7: note = XENP016434 vlCDR2
SASFLYS

SEQ ID NO: 29390 - protein, 9 aa, synthetic construct
  REGION 1..9: note = Description of Artificial Sequence: Synthetic peptide
  REGION 1..9: note = XENP016434 vlCDR3
QQYLYHPAT

SEQ ID NO: 29391 - protein, 214 aa, synthetic construct; identical to SEQ ID NO: 27132
  REGION 1..214: note = Description of Artificial Sequence: Synthetic polypeptide
  REGION 1..214: note = XENP016434 Full length light chain

SEQ ID NO: 29392 - protein, 120 aa, synthetic construct; identical to SEQ ID NO: 3977
  REGION 1..120: note = Description of Artificial Sequence: Synthetic polypeptide
  REGION 1..120: note = VH of XENP024118

SEQ ID NO: 29393 - protein, 5 aa, synthetic construct
  REGION 1..5: note = Description of Artificial Sequence: Synthetic peptide
  REGION 1..5: note = XENP024118 vhCDR1
SYIMM

SEQ ID NO: 29394 - protein, 17 aa, synthetic construct
  REGION 1..17: note = Description of Artificial Sequence: Synthetic peptide
  REGION 1..17: note = XENP024118 vhCDR2
SIYPSGGITFYADTVKG

SEQ ID NO: 29395 - protein, 11 aa, synthetic construct
  REGION 1..11: note = Description of Artificial Sequence: Synthetic peptide
  REGION 1..11: note = XENP024118 vhCDR3
IKLGTVTTVDY

SEQ ID NO: 29396 - protein, 449 aa, synthetic construct; identical to SEQ ID NO: 27516
  REGION 1..449: note = Description of Artificial Sequence: Synthetic polypeptide
  REGION 1..449: note = XENP024118 Full length HC

SEQ ID NO: 29397 - protein, 110 aa, synthetic construct; identical to SEQ ID NO: 3981
  REGION 1..110: note = Description of Artificial Sequence: Synthetic polypeptide
  REGION 1..110: note = VL of XENP024118

SEQ ID NO: 29398 - protein, 14 aa, synthetic construct
  REGION 1..14: note = Description of Artificial Sequence: Synthetic peptide
  REGION 1..14: note = XENP024118 vlCDR1
TGTSSDVGGYNYVS

SEQ ID NO: 29399 - protein, 7 aa, synthetic construct
  REGION 1..7: note = Description of Artificial Sequence: Synthetic peptide
  REGION 1..7: note = XENP024118 vlCDR2
DVSNRPS

SEQ ID NO: 29400 - protein, 10 aa, synthetic construct
  REGION 1..10: note = Description of Artificial Sequence: Synthetic peptide
  REGION 1..10: note = XENP024118 vlCDR3
SSYTSSSTRV

SEQ ID NO: 29401 - protein, 216 aa, synthetic construct; identical to SEQ ID NO: 27172
  REGION 1..216: note = Description of Artificial Sequence: Synthetic polypeptide
  REGION 1..216: note = XENP024118 Full length light chain

SEQ ID NO: 29402 - protein, 121 aa, synthetic construct; identical to SEQ ID NO: 3961
  REGION 1..121: note = Description of Artificial Sequence: Synthetic polypeptide
  REGION 1..121: note = VH of XENP024119

SEQ ID NO: 29403 - protein, 5 aa, synthetic construct
  REGION 1..5: note = Description of Artificial Sequence: Synthetic peptide
  REGION 1..5: note = XENP024119 vhCDR1
RYWMS

SEQ ID NO: 29404 - protein, 17 aa, synthetic construct
  REGION 1..17: note = Description of Artificial Sequence: Synthetic peptide
  REGION 1..17: note = XENP024119 vhCDR2
NIKQDGSEKYYVDSVKG

SEQ ID NO: 29405 - protein, 12 aa, synthetic construct
  REGION 1..12: note = Description of Artificial Sequence: Synthetic peptide
  REGION 1..12: note = XENP024119 vhCDR3
EGGWFGELAFDY

SEQ ID NO: 29406 - protein, 450 aa, synthetic construct; identical to SEQ ID NO: 27526
  REGION 1..450: note = Description of Artificial Sequence: Synthetic polypeptide
  REGION 1..450: note = XENP024119 Full length HC

SEQ ID NO: 29407 - protein, 108 aa, synthetic construct; identical to SEQ ID NO: 3965
  REGION 1..108: note = Description of Artificial Sequence: Synthetic polypeptide
  REGION 1..108: note = VL of XENP024119

SEQ ID NO: 29408 - protein, 12 aa, synthetic construct
  REGION 1..12: note = Description of Artificial Sequence: Synthetic peptide
  REGION 1..12: note = XENP024119 vlCDR1
RASQRVSSSYLA

SEQ ID NO: 29409 - protein, 7 aa, synthetic construct
  REGION 1..7: note = Description of Artificial Sequence: Synthetic peptide
  REGION 1..7: note = XENP024119 vlCDR2
DASSRAT

SEQ ID NO: 29410 - protein, 9 aa, synthetic construct
  REGION 1..9: note = Description of Artificial Sequence: Synthetic peptide
  REGION 1..9: note = XENP024119 vlCDR3
QQYGSLPWT

SEQ ID NO: 29411 - protein, 215 aa, synthetic construct; identical to SEQ ID NO: 27152
  REGION 1..215: note = Description of Artificial Sequence: Synthetic polypeptide
  REGION 1..215: note = XENP024119 Full length light chain

SEQ ID NO: 29412 - protein, 121 aa, synthetic construct [sequence omitted]

SEQ ID NO: 29413 - protein, 5 aa, synthetic construct
  REGION 1..5: note = Description of Artificial Sequence: Synthetic peptide
  REGION 1..5: note = XENP014410 vhCDR1
GYYWS

SEQ ID NO: 29414 - protein, 16 aa, synthetic construct
  REGION 1..16: note = Description of Artificial Sequence: Synthetic peptide
  REGION 1..16: note = XENP014410 vhCDR2
EINHGGYVTYNPSLES

SEQ ID NO: 29415 - protein, 13 aa, synthetic construct
  REGION 1..13: note = Description of Artificial Sequence: Synthetic peptide
  REGION 1..13: note = XENP014410 vhCDR3
DYGPGNYDWYFDL

SEQ ID NO: 29416 - protein, 450 aa, synthetic construct; identical to SEQ ID NO: 26262
  REGION 1..450: note = Description of Artificial Sequence: Synthetic polypeptide
  REGION 1..450: note = XENP014410 Full length HC

SEQ ID NO: 29417 - protein, 109 aa, synthetic construct [sequence omitted]

SEQ ID NO: 29418 - protein, 11 aa, synthetic construct
  REGION 1..11: note = Description of Artificial Sequence: Synthetic peptide
  REGION 1..11: note = XENP014410 vlCDR1
RASQSVSSYLA

SEQ ID NO: 29419 - protein, 7 aa, synthetic construct
  REGION 1..7: note = Description of Artificial Sequence: Synthetic peptide
  REGION 1..7: note = XENP014410 vlCDR2
DASNRAT

SEQ ID NO: 29420 - protein, 11 aa, synthetic construct
  REGION 1..11: note = Description of Artificial Sequence: Synthetic peptide
  REGION 1..11: note = XENP014410 vlCDR3
QQRSNWPPALT

SEQ ID NO: 29421 - protein, 216 aa, synthetic construct; identical to SEQ ID NO: 26267
  REGION 1..216: note = Description of Artificial Sequence: Synthetic polypeptide
  REGION 1..216: note = XENP014410 Full length light chain

SEQ ID NO: 29422 - protein, 118 aa, synthetic construct; identical to SEQ ID NO: 26273
  REGION 1..118: note = Description of Artificial Sequence: Synthetic polypeptide
  REGION 1..118: note = VH of XENP016437

SEQ ID NO: 29423 - protein, 5 aa, synthetic construct
  REGION 1..5: note = Description of Artificial Sequence: Synthetic peptide
  REGION 1..5: note = XENP016437 vhCDR1
SYSMN

SEQ ID NO: 29424 - protein, 17 aa, synthetic construct
  REGION 1..17: note = Description of Artificial Sequence: Synthetic peptide
  REGION 1..17: note = XENP016437 vhCDR2
YISSSSSTIDYADSVKG

SEQ ID NO: 29425 - protein, 9 aa, synthetic construct
  REGION 1..9: note = Description of Artificial Sequence: Synthetic peptide
  REGION 1..9: note = XENP016437 vhCDR3
ESGWYLFDY

SEQ ID NO: 29426 - protein, 447 aa, synthetic construct; identical to SEQ ID NO: 26272
  REGION 1..447: note = Description of Artificial Sequence: Synthetic polypeptide
  REGION 1..447: note = XENP016437 Full length HC

SEQ ID NO: 29427 - protein, 107 aa, synthetic construct; identical to SEQ ID NO: 26278
  REGION 1..107: note = Description of Artificial Sequence: Synthetic polypeptide
  REGION 1..107: note = VL of XENP016437

SEQ ID NO: 29428 - protein, 11 aa, synthetic construct
  REGION 1..11: note = Description of Artificial Sequence: Synthetic peptide
  REGION 1..11: note = XENP016437 vlCDR1
RASQGISSWLA

SEQ ID NO: 29429 - protein, 7 aa, synthetic construct
  REGION 1..7: note = Description of Artificial Sequence: Synthetic peptide
  REGION 1..7: note = XENP016437 vlCDR2
AASSLQS

SEQ ID NO: 29430 - protein, 9 aa, synthetic construct
  REGION 1..9: note = Description of Artificial Sequence: Synthetic peptide
  REGION 1..9: note = XENP016437 vlCDR3
QQYNSYPPT

SEQ ID NO: 29431 - protein, 214 aa, synthetic construct; identical to SEQ ID NO: 26277
  REGION 1..214: note = Description of Artificial Sequence: Synthetic polypeptide
  REGION 1..214: note = XENP016437 Full length light chain

SEQ ID NO: 29432 - protein, 122 aa, synthetic construct; identical to SEQ ID NO: 26283
  REGION 1..122: note = Description of Artificial Sequence: Synthetic polypeptide
  REGION 1..122: note = VH of XENP016438

SEQ ID NO: 29433 - protein, 7 aa, synthetic construct
  REGION 1..7: note = Description of Artificial Sequence: Synthetic peptide
  REGION 1..7: note = XENP016438 vhCDR1
TSGMGVG

SEQ ID NO: 29434 - protein, 16 aa, synthetic construct
  REGION 1..16: note = Description of Artificial Sequence: Synthetic peptide
  REGION 1..16: note = XENP016438 vhCDR2
HIWWDDDKYYSPSLKS

SEQ ID NO: 29435 - protein, 12 aa, synthetic construct
  REGION 1..12: note = Description of Artificial Sequence: Synthetic peptide
  REGION 1..12: note = XENP016438 vhCDR3
SYYYGSSGAMDY

SEQ ID NO: 29436 - protein, 451 aa, synthetic construct; identical to SEQ ID NO: 26282
  REGION 1..451: note = Description of Artificial Sequence: Synthetic polypeptide
  REGION 1..451: note = XENP016438 Full length HC

SEQ ID NO: 29437 - protein, 112 aa, synthetic construct; identical to SEQ ID NO: 26288
  REGION 1..112: note = Description of Artificial Sequence: Synthetic polypeptide
  REGION 1..112: note = VL of XENP016438

SEQ ID NO: 29438 - protein, 16 aa, synthetic construct
  REGION 1..16: note = Description of Artificial Sequence: Synthetic peptide
  REGION 1..16: note = XENP016438 vlCDR1
RSSQSLVHSDGNTYLH

SEQ ID NO: 29439 - protein, 7 aa, synthetic construct
  REGION 1..7: note = Description of Artificial Sequence: Synthetic peptide
  REGION 1..7: note = XENP016438 vlCDR2
KVSKRFS

SEQ ID NO: 29440 - protein, 9 aa, synthetic construct
  REGION 1..9: note = Description of Artificial Sequence: Synthetic peptide
  REGION 1..9: note = XENP016438 vlCDR3
SQSTHVPPT

SEQ ID NO: 29441 - protein, 219 aa, synthetic construct; identical to SEQ ID NO: 26287
  REGION 1..219: note = Description of Artificial Sequence: Synthetic polypeptide
  REGION 1..219: note = XENP016438 Full length light chain

SEQ ID NO: 29442 - protein, 125 aa, synthetic construct; identical to SEQ ID NO: 26293
  REGION 1..125: note = Description of Artificial Sequence: Synthetic polypeptide
  REGION 1..125: note = VH of XENP016435

SEQ ID NO: 29443 - protein, 5 aa, synthetic construct
  REGION 1..5: note = Description of Artificial Sequence: Synthetic peptide
  REGION 1..5: note = XENP016435 vhCDR1
GYYMH

SEQ ID NO: 29444 - protein, 17 aa, synthetic construct
  REGION 1..17: note = Description of Artificial Sequence: Synthetic peptide
  REGION 1..17: note = XENP016435 vhCDR2
WINPHSGGTNYAQKFQG

SEQ ID NO: 29445 - protein, 16 aa, synthetic construct
  REGION 1..16: note = Description of Artificial Sequence: Synthetic peptide
  REGION 1..16: note = XENP016435 vhCDR3
TYYYDSSGYYHDAFDI

SEQ ID NO: 29446 - protein, 454 aa, synthetic construct; identical to SEQ ID NO: 26292
  REGION 1..454: note = Description of Artificial Sequence: Synthetic polypeptide
  REGION 1..454: note = XENP016435 Full length HC

SEQ ID NO: 29447 - protein, 107 aa, synthetic construct; identical to SEQ ID NO: 26298
  REGION 1..107: note = Description of Artificial Sequence: Synthetic polypeptide
  REGION 1..107: note = VL of XENP016435

SEQ ID NO: 29448 - protein, 11 aa, synthetic construct
  REGION 1..11: note = Description of Artificial Sequence: Synthetic peptide
  REGION 1..11: note = XENP016435 vlCDR1
RASQGISRLLA

SEQ ID NO: 29449 - protein, 7 aa, synthetic construct
  REGION 1..7: note = Description of Artificial Sequence: Synthetic peptide
  REGION 1..7: note = XENP016435 vlCDR2
VASSLQS

SEQ ID NO: 29450 - protein, 9 aa, synthetic construct
  REGION 1..9: note = Description of Artificial Sequence: Synthetic peptide
  REGION 1..9: note = XENP016435 vlCDR3
QQANSFPWT

SEQ ID NO: 29451 - protein, 214 aa, synthetic construct; identical to SEQ ID NO: 26297
  REGION 1..214: note = Description of Artificial Sequence: Synthetic polypeptide
  REGION 1..214: note = XENP016435 Full length light chain

SEQ ID NO: 29452 - protein, 123 aa, synthetic construct; identical to SEQ ID NO: 26303
  REGION 1..123: note = Description of Artificial Sequence: Synthetic polypeptide
  REGION 1..123: note = VH of XENP021820

SEQ ID NO: 29453 - protein, 5 aa, synthetic construct
  REGION 1..5: note = Description of Artificial Sequence: Synthetic peptide
  REGION 1..5: note = XENP021820 vhCDR1
TYWMH

SEQ ID NO: 29454 - protein, 17 aa, synthetic construct
  REGION 1..17: note = Description of Artificial Sequence: Synthetic peptide
  REGION 1..17: note = XENP021820 vhCDR2
EIDPSDSYVNYNQNFKG

SEQ ID NO: 29455 - protein, 14 aa, synthetic construct
  REGION 1..14: note = Description of Artificial Sequence: Synthetic peptide
  REGION 1..14: note = XENP021820 vhCDR3
SPDYYGTSLAWFDY

SEQ ID NO: 29456 - protein, 452 aa, synthetic construct; identical to SEQ ID NO: 26302
  REGION 1..452: note = Description of Artificial Sequence: Synthetic polypeptide
  REGION 1..452: note = XENP021820 Full length HC

SEQ ID NO: 29457 - protein, 112 aa, synthetic construct; identical to SEQ ID NO: 26308
  REGION 1..112: note = Description of Artificial Sequence: Synthetic polypeptide
  REGION 1..112: note = VL of XENP021820

SEQ ID NO: 29458 - protein, 16 aa, synthetic construct
  REGION 1..16: note = Description of Artificial Sequence: Synthetic peptide
  REGION 1..16: note = XENP021820 vlCDR1
RSSKSPLHSNGNIYLY

SEQ ID NO: 29459 - protein, 7 aa, synthetic construct
  REGION 1..7: note = Description of Artificial Sequence: Synthetic peptide
  REGION 1..7: note = XENP021820 vlCDR2
RMSNLAS

SEQ ID NO: 29460 - protein, 9 aa, synthetic construct
  REGION 1..9: note = Description of Artificial Sequence: Synthetic peptide
  REGION 1..9: note = XENP021820 vlCDR3
MQHLEYPYT

SEQ ID NO: 29461 - protein, 219 aa, synthetic construct; identical to SEQ ID NO: 26307
  REGION 1..219: note = Description of Artificial Sequence: Synthetic polypeptide
  REGION 1..219: note = XENP021820 Full length light chain

SEQ ID NO: 29462 - protein, 124 aa, synthetic construct; identical to SEQ ID NO: 26313
  REGION 1..124: note = Description of Artificial Sequence: Synthetic polypeptide
  REGION 1..124: note = VH of XENP021821

SEQ ID NO: 29463 - protein, 5 aa, synthetic construct
  REGION 1..5: note = Description of Artificial Sequence: Synthetic peptide
  REGION 1..5: note = XENP021821 vhCDR1
SYWIN

SEQ ID NO: 29464 - protein, 17 aa, synthetic construct
  REGION 1..17: note = Description of Artificial Sequence: Synthetic peptide
  REGION 1..17: note = XENP021821 vhCDR2
NIYPSDSYTNYNQMFKD

SEQ ID NO: 29465 - protein, 15 aa, synthetic construct
  REGION 1..15: note = Description of Artificial Sequence: Synthetic peptide
  REGION 1..15: note = XENP021821 vhCDR3
WNLSYYFDNNYYLDY

SEQ ID NO: 29466 - protein, 453 aa, synthetic construct; identical to SEQ ID NO: 26312
  REGION 1..453: note = Description of Artificial Sequence: Synthetic polypeptide
  REGION 1..453: note = XENP021821 Full length HC

SEQ ID NO: 29467 - protein, 112 aa, synthetic construct; identical to SEQ ID NO: 26318
  REGION 1..112: note = Description of Artificial Sequence: Synthetic polypeptide
  REGION 1..112: note = VL of XENP021821

SEQ ID NO: 29468 - protein, 16 aa, synthetic construct
  REGION 1..16: note = Description of Artificial Sequence: Synthetic peptide
  REGION 1..16: note = XENP021821 vlCDR1
RSSKSLLHSNGNTYLY

SEQ ID NO: 29469 - protein, 7 aa, synthetic construct
  REGION 1..7: note = Description of Artificial Sequence: Synthetic peptide
  REGION 1..7: note = XENP021821 vlCDR2
RMSNLAS

SEQ ID NO: 29470 - protein, 9 aa, synthetic construct
  REGION 1..9: note = Description of Artificial Sequence: Synthetic peptide
  REGION 1..9: note = XENP021821 vlCDR3
MQHLEYPWT

SEQ ID NO: 29471 - protein, 219 aa, synthetic construct; identical to SEQ ID NO: 26317
  REGION 1..219: note = Description of Artificial Sequence: Synthetic polypeptide
  REGION 1..219: note = XENP021821 Full length light chain

SEQ ID NO: 29472 - protein, 125 aa, synthetic construct; identical to SEQ ID NO: 26323
  REGION 1..125: note = Description of Artificial Sequence: Synthetic polypeptide
  REGION 1..125: note = VH of XENP021822

SEQ ID NO: 29473 - protein, 5 aa, synthetic construct
  REGION 1..5: note = Description of Artificial Sequence: Synthetic peptide
  REGION 1..5: note = XENP021822 vhCDR1
SYDMH

SEQ ID NO: 29474 - protein, 16 aa, synthetic construct
  REGION 1..16: note = Description of Artificial Sequence: Synthetic peptide
  REGION 1..16: note = XENP021822 vhCDR2
AIGTAGDTYYPGSVKG

SEQ ID NO: 29475 - protein, 17 aa, synthetic construct
  REGION 1..17: note = Description of Artificial Sequence: Synthetic peptide
  REGION 1..17: note = XENP021822 vhCDR3
DNRKVTHEHYYYYGMDV

SEQ ID NO: 29476 - protein, 454 aa, synthetic construct; identical to SEQ ID NO: 26322
  REGION 1..454: note = Description of Artificial Sequence: Synthetic polypeptide
  REGION 1..454: note = XENP021822 Full length HC

SEQ ID NO: 29477 - protein, 109 aa, synthetic construct; identical to SEQ ID NO: 26328
  REGION 1..109: note = Description of Artificial Sequence: Synthetic polypeptide
  REGION 1..109: note = VL of XENP021822

SEQ ID NO: 29478 - protein, 12 aa, synthetic construct
  REGION 1..12: note = Description of Artificial Sequence: Synthetic peptide
  REGION 1..12: note = XENP021822 vlCDR1
RASQNIRSSYLA

SEQ ID NO: 29479 - protein, 7 aa, synthetic construct
  REGION 1..7: note = Description of Artificial Sequence: Synthetic peptide
  REGION 1..7: note = XENP021822 vlCDR2
GASSRAT

SEQ ID NO: 29480 - protein, 10 aa, synthetic construct
  REGION 1..10: note = Description of Artificial Sequence: Synthetic peptide
  REGION 1..10: note = XENP021822 vlCDR3
QQFGSSPMCS

SEQ ID NO: 29481 - protein, 216 aa, synthetic construct; identical to SEQ ID NO: 26327
  REGION 1..216: note = Description of Artificial Sequence: Synthetic polypeptide
  REGION 1..216: note = XENP021822 Full length light chain

SEQ ID NO: 29482 - protein, 125 aa, synthetic construct; identical to SEQ ID NO: 26333
  REGION 1..125: note = Description of Artificial Sequence: Synthetic polypeptide
  REGION 1..125: note = VH of XENP021823

SEQ ID NO: 29483 - protein, 5 aa, synthetic construct
  REGION 1..5: note = Description of Artificial Sequence: Synthetic peptide
  REGION 1..5: note = XENP021823 vhCDR1
SYDMH

SEQ ID NO: 29484 - protein, 16 aa, synthetic construct
  REGION 1..16: note = Description of Artificial Sequence: Synthetic peptide
  REGION 1..16: note = XENP021823 vhCDR2
AIGTAGDTYYPGSVKG

SEQ ID NO: 29485 - protein, 17 aa, synthetic construct
  REGION 1..17: note = Description of Artificial Sequence: Synthetic peptide
  REGION 1..17: note = XENP021823 vhCDR3
DKRTVTHEHYYYYGMDV

SEQ ID NO: 29486 - protein, 454 aa, synthetic construct; identical to SEQ ID NO: 26332
  REGION 1..454: note = Description of Artificial Sequence: Synthetic polypeptide
  REGION 1..454: note = XENP021823 Full length HC

SEQ ID NO: 29487 - protein, 109 aa, synthetic construct; identical to SEQ ID NO: 26338
  REGION 1..109: note = Description of Artificial Sequence: Synthetic polypeptide
  REGION 1..109: note = VL of XENP021823

SEQ ID NO: 29488 - protein, 12 aa, synthetic construct
  REGION 1..12: note = Description of Artificial Sequence: Synthetic peptide
  REGION 1..12: note = XENP021823 vlCDR1
RASQSISSSSLA

SEQ ID NO: 29489 - protein, 7 aa, synthetic construct
  REGION 1..7: note = Description of Artificial Sequence: Synthetic peptide
  REGION 1..7: note = XENP021823 vlCDR2
GASSRAT

SEQ ID NO: 29490 - protein, 10 aa, synthetic construct
  REGION 1..10: note = Description of Artificial Sequence: Synthetic peptide
  REGION 1..10: note = XENP021823 vlCDR3
QQFGSSPMCS

SEQ ID NO: 29491 - protein, 216 aa, synthetic construct; identical to SEQ ID NO: 26337
  REGION 1..216: note = Description of Artificial Sequence: Synthetic polypeptide
  REGION 1..216: note = XENP021823 Full length light chain

SEQ ID NO: 29492 - protein, 121 aa, synthetic construct; identical to SEQ ID NO: 26343
  REGION 1..121: note = Description of Artificial Sequence: Synthetic polypeptide
  REGION 1..121: note = VH of XENP022346

SEQ ID NO: 29493 - protein, 5 aa, synthetic construct
  REGION 1..5: note = Description of Artificial Sequence: Synthetic peptide
  REGION 1..5: note = XENP022346 vhCDR1
DYAMH

SEQ ID NO: 29494 - protein, 17 aa, synthetic construct
  REGION 1..17: note = Description of Artificial Sequence: Synthetic peptide
  REGION 1..17: note = XENP022346 vhCDR2
LISIYSDHTNYNQKFQG

SEQ ID NO: 29495 - protein, 12 aa, synthetic construct
  REGION 1..12: note = Description of Artificial Sequence: Synthetic peptide
  REGION 1..12: note = XENP022346 vhCDR3
NNYGNYGWYFDV

SEQ ID NO: 29496 - protein, 450 aa, synthetic construct; identical to SEQ ID NO: 26342
  REGION 1..450: note = Description of Artificial Sequence: Synthetic polypeptide
  REGION 1..450: note = XENP022346 Full length HC

SEQ ID NO: 29497 - protein, 106 aa, synthetic construct; identical to SEQ ID NO: 26348
  REGION 1..106: note = Description of Artificial Sequence: Synthetic polypeptide
  REGION 1..106: note = VL of XENP022346

SEQ ID NO: 29498 - protein, 10 aa, synthetic construct
  REGION 1..10: note = Description of Artificial Sequence: Synthetic peptide
  REGION 1..10: note = XENP022346 vlCDR1
SASSSVSYMH

SEQ ID NO: 29499 - protein, 7 aa, synthetic construct
  REGION 1..7: note = Description of Artificial Sequence: Synthetic peptide
  REGION 1..7: note = XENP022346 vlCDR2
DTSKLAS

SEQ ID NO: 29500 - protein, 9 aa, synthetic construct
  REGION 1..9: note = Description of Artificial Sequence: Synthetic peptide
  REGION 1..9: note = XENP022346 vlCDR3
FQGSGYPYT

SEQ ID NO: 29501 - protein, 213 aa, synthetic construct; identical to SEQ ID NO: 26347
  REGION 1..213: note = Description of Artificial Sequence: Synthetic polypeptide
  REGION 1..213: note = XENP022346 Full length light chain

SEQ ID NO: 29502 - protein, 117 aa, synthetic construct; identical to SEQ ID NO: 26353
  REGION 1..117: note = Description of Artificial Sequence: Synthetic polypeptide
  REGION 1..117: note = VH of XENP023057

SEQ ID NO: 29503 - protein, 5 aa, synthetic construct
  REGION 1..5: note = Description of Artificial Sequence: Synthetic peptide
  REGION 1..5: note = XENP023057 vhCDR1
DYWMD

SEQ ID NO: 29504 - protein, 17 aa, synthetic construct
  REGION 1..17: note = Description of Artificial Sequence: Synthetic peptide
  REGION 1..17: note = XENP023057 vhCDR2
NIDEDGSITEYSPFVKG

SEQ ID NO: 29505 - protein, 8 aa, synthetic construct
  REGION 1..8: note = Description of Artificial Sequence: Synthetic peptide
  REGION 1..8: note = XENP023057 vhCDR3
WGRFGFDS

SEQ ID NO: 29506 - protein, 446 aa, synthetic construct; identical to SEQ ID NO: 26352
  REGION 1..446: note = Description of Artificial Sequence: Synthetic polypeptide
  REGION 1..446: note = XENP023057 Full length HC

SEQ ID NO: 29507 - protein, 111 aa, synthetic construct; identical to SEQ ID NO: 26358
  REGION 1..111: note = Description of Artificial Sequence: Synthetic polypeptide
  REGION 1..111: note = VL of XENP023057

SEQ ID NO: 29508 - protein, 15 aa, synthetic construct
  REGION 1..15: note = Description of Artificial Sequence: Synthetic peptide
  REGION 1..15: note = XENP023057 vlCDR1
KSSQSLLSGSFNYLT

SEQ ID NO: 29509 - protein, 7 aa, synthetic construct
  REGION 1..7: note = Description of Artificial Sequence: Synthetic peptide
  REGION 1..7: note = XENP023057 vlCDR2
YASTRHT

SEQ ID NO: 29510 - protein, 9 aa, synthetic construct
  REGION 1..9: note = Description of Artificial Sequence: Synthetic peptide
  REGION 1..9: note = XENP023057 vlCDR3
HHHYNAPPT

SEQ ID NO: 29511 - protein, 218 aa, synthetic construct; identical to SEQ ID NO: 26357
  REGION 1..218: note = Description of Artificial Sequence: Synthetic polypeptide
  REGION 1..218: note = XENP023057 Full length light chain

SEQ ID NO: 29512 - protein, 125 aa, synthetic construct; identical to SEQ ID NO: 26293
  REGION 1..125: note = Description of Artificial Sequence: Synthetic polypeptide
  REGION 1..125: note = VH of XENP022091

SEQ ID NO: 29513 - protein, 5 aa, synthetic construct
  REGION 1..5: note = Description of Artificial Sequence: Synthetic peptide
  REGION 1..5: note = XENP022091 vhCDR1
GYYMH

SEQ ID NO: 29514 - protein, 17 aa, synthetic construct
  REGION 1..17: note = Description of Artificial Sequence: Synthetic peptide
  REGION 1..17: note = XENP022091 vhCDR2
WINPHSGGTNYAQKFQG

SEQ ID NO: 29515 - protein, 16 aa, synthetic construct
  REGION 1..16: note = Description of Artificial Sequence: Synthetic peptide
  REGION 1..16: note = XENP022091 vhCDR3
TYYYDSSGYYHDAFDI

SEQ ID NO: 29516 - protein, 230 aa, synthetic construct; identical to SEQ ID NO: 27869
  REGION 1..230: note = Description of Artificial Sequence: Synthetic polypeptide
  REGION 1..230: note = XENP022091 Full length HC

SEQ ID NO: 29517 - protein, 107 aa, synthetic construct; identical to SEQ ID NO: 26478
  REGION 1..107: note = Description of Artificial Sequence: Synthetic polypeptide
  REGION 1..107: note = VL of XENP022091

SEQ ID NO: 29518 - protein, 11 aa, synthetic construct
  REGION 1..11: note = Description of Artificial Sequence: Synthetic peptide
  REGION 1..11: note = XENP022091 vlCDR1
RASQGISSYLA

SEQ ID NO: 29519 - protein, 7 aa, synthetic construct
  REGION 1..7: note = Description of Artificial Sequence: Synthetic peptide
  REGION 1..7: note = XENP022091 vlCDR2
VASSLQS

SEQ ID NO: 29520 - protein, 9 aa, synthetic construct
  REGION 1..9: note = Description of Artificial Sequence: Synthetic peptide
  REGION 1..9: note = XENP022091 vlCDR3
QQANSFPWT

SEQ ID NO: 29521 - protein, 214 aa, synthetic construct; identical to SEQ ID NO: 26477
  REGION 1..214: note = Description of Artificial Sequence: Synthetic polypeptide
  REGION 1..214: note = XENP022091 Full length light chain

SEQ ID NO: 29522 - protein, 125 aa, synthetic construct; identical to SEQ ID NO: 26293
  REGION 1..125: note = Description of Artificial Sequence: Synthetic polypeptide
  REGION 1..125: note = VH of XENP022780

SEQ ID NO: 29523 - protein, 5 aa, synthetic construct
  REGION 1..5: note = Description of Artificial Sequence: Synthetic peptide
  REGION 1..5: note = XENP022780 vhCDR1
GYYMH

SEQ ID NO: 29524 - protein, 17 aa, synthetic construct
  REGION 1..17: note = Description of Artificial Sequence: Synthetic peptide
  REGION 1..17: note = XENP022780 vhCDR2
WINPHSGGTNYAQKFQG

SEQ ID NO: 29525 - protein, 16 aa, synthetic construct
  REGION 1..16: note = Description of Artificial Sequence: Synthetic peptide
  REGION 1..16: note = XENP022780 vhCDR3
TYYYDSSGYYHDAFDI

SEQ ID NO: 29526 - protein, 230 aa, synthetic construct; identical to SEQ ID NO: 27869
  REGION 1..230: note = Description of Artificial Sequence: Synthetic polypeptide
  REGION 1..230: note = XENP022780 Full length HC

SEQ ID NO: 29527 - protein, 107 aa, synthetic construct; identical to SEQ ID NO: 26498
  REGION 1..107: note = Description of Artificial Sequence: Synthetic polypeptide
  REGION 1..107: note = VL of XENP022780

SEQ ID NO: 29528 - protein, 11 aa, synthetic construct
  REGION 1..11: note = Description of Artificial Sequence: Synthetic peptide
  REGION 1..11: note = XENP022780 vlCDR1
QASQDISRLLA

SEQ ID NO: 29529 - protein, 7 aa, synthetic construct
  REGION 1..7: note = Description of Artificial Sequence: Synthetic peptide
  REGION 1..7: note = XENP022780 vlCDR2
VASSLQS

SEQ ID NO: 29530 - protein, 9 aa, synthetic construct
  REGION 1..9: note = Description of Artificial Sequence: Synthetic peptide
  REGION 1..9: note = XENP022780 vlCDR3
QQAESFPWT

SEQ ID NO: 29531 - protein, 214 aa, synthetic construct; identical to SEQ ID NO: 26497
  REGION 1..214: note = Description of Artificial Sequence: Synthetic polypeptide
  REGION 1..214: note = XENP022780 Full length light chain

SEQ ID NO: 29532 - protein, 125 aa, synthetic construct; identical to SEQ ID NO: 26293
  REGION 1..125: note = Description of Artificial Sequence: Synthetic polypeptide
  REGION 1..125: note = VH of XENP022782

SEQ ID NO: 29533 - protein, 5 aa, synthetic construct
  REGION 1..5: note = Description of Artificial Sequence: Synthetic peptide
  REGION 1..5: note = XENP022782 vhCDR1
GYYMH

SEQ ID NO: 29534 - protein, 17 aa, synthetic construct
  REGION 1..17: note = Description of Artificial Sequence: Synthetic peptide
  REGION 1..17: note = XENP022782 vhCDR2
WINPHSGGTNYAQKFQG

SEQ ID NO: 29535 - protein, 16 aa, synthetic construct
  REGION 1..16: note = Description of Artificial Sequence: Synthetic peptide
  REGION 1..16: note = XENP022782 vhCDR3
TYYYDSSGYYHDAFDI

SEQ ID NO: 29536 - protein, 230 aa, synthetic construct; identical to SEQ ID NO: 27869
  REGION 1..230: note = Description of Artificial Sequence: Synthetic polypeptide
  REGION 1..230: note = XENP022782 Full length HC

SEQ ID NO: 29537 - protein, 107 aa, synthetic construct; identical to SEQ ID NO: 26518
  REGION 1..107: note = Description of Artificial Sequence: Synthetic polypeptide
  REGION 1..107: note = VL of XENP022782

SEQ ID NO: 29538 - protein, 11 aa, synthetic construct
  REGION 1..11: note = Description of Artificial Sequence: Synthetic peptide
  REGION 1..11: note = XENP022782 vlCDR1
QASQDISSLLA

SEQ ID NO: 29539 - protein, 7 aa, synthetic construct
  REGION 1..7: note = Description of Artificial Sequence: Synthetic peptide
  REGION 1..7: note = XENP022782 vlCDR2
VASSLQS

SEQ ID NO: 29540 - protein, 9 aa, synthetic construct
  REGION 1..9: note = Description of Artificial Sequence: Synthetic peptide
  REGION 1..9: note = XENP022782 vlCDR3
QQAESFPWT

SEQ ID NO: 29541 - protein, 214 aa, synthetic construct; identical to SEQ ID NO: 26517
  REGION 1..214: note = Description of Artificial Sequence: Synthetic polypeptide
  REGION 1..214: note = XENP022782 Full length light chain

SEQ ID NO: 29542 - protein, 125 aa, synthetic construct; identical to SEQ ID NO: 26293
  REGION 1..125: note = Description of Artificial Sequence: Synthetic polypeptide
  REGION 1..125: note = VH of XENP022783

SEQ ID NO: 29543 - protein, 5 aa, synthetic construct
  REGION 1..5: note = Description of Artificial Sequence: Synthetic peptide
  REGION 1..5: note = XENP022783 vhCDR1
GYYMH

SEQ ID NO: 29544 - protein, 17 aa, synthetic construct
  REGION 1..17: note = Description of Artificial Sequence: Synthetic peptide
  REGION 1..17: note = XENP022783 vhCDR2
WINPHSGGTNYAQKFQG

SEQ ID NO: 29545 - protein, 16 aa, synthetic construct
  REGION 1..16: note = Description of Artificial Sequence: Synthetic peptide
  REGION 1..16: note = XENP022783 vhCDR3
TYYYDSSGYYHDAFDI

SEQ ID NO: 29546 - protein, 230 aa, synthetic construct; identical to SEQ ID NO: 27869
  REGION 1..230: note = Description of Artificial Sequence: Synthetic polypeptide
  REGION 1..230: note = XENP022783 Full length HC

SEQ ID NO: 29547 - protein, 107 aa, synthetic construct; identical to SEQ ID NO: 26538
  REGION 1..107: note = Description of Artificial Sequence: Synthetic polypeptide
  REGION 1..107: note = VL of XENP022783

SEQ ID NO: 29548 - protein, 11 aa, synthetic construct
  REGION 1..11: note = Description of Artificial Sequence: Synthetic peptide
  REGION 1..11: note = XENP022783 vlCDR1
QASQDISRLLA

SEQ ID NO: 29549 - protein, 7 aa, synthetic construct
  REGION 1..7: note = Description of Artificial Sequence: Synthetic peptide
  REGION 1..7: note = XENP022783 vlCDR2
AASSLQS

SEQ ID NO: 29550 - protein, 9 aa, synthetic construct
  REGION 1..9: note = Description of Artificial Sequence: Synthetic peptide
  REGION 1..9: note = XENP022783 vlCDR3
QQAESFPWT

SEQ ID NO: 29551 - protein, 214 aa, synthetic construct; identical to SEQ ID NO: 26537
  REGION 1..214: note = Description of Artificial Sequence: Synthetic polypeptide
  REGION 1..214: note = XENP022783 Full length light chain

SEQ ID NO: 29552 - protein, 125 aa, synthetic construct; identical to SEQ ID NO: 26293
  REGION 1..125: note = Description of Artificial Sequence: Synthetic polypeptide
  REGION 1..125: note = VH of XENP022784

SEQ ID NO: 29553 - protein, 5 aa, synthetic construct
  REGION 1..5: note = Description of Artificial Sequence: Synthetic peptide
  REGION 1..5: note = XENP022784 vhCDR1
GYYMH

SEQ ID NO: 29554 - protein, 17 aa, synthetic construct
  REGION 1..17: note = Description of Artificial Sequence: Synthetic peptide
  REGION 1..17: note = XENP022784 vhCDR2
WINPHSGGTNYAQKFQG

SEQ ID NO: 29555 - protein, 16 aa, synthetic construct
  REGION 1..16: note = Description of Artificial Sequence: Synthetic peptide
  REGION 1..16: note = XENP022784 vhCDR3
TYYYDSSGYYHDAFDI

SEQ ID NO: 29556 - protein, 230 aa, synthetic construct; identical to SEQ ID NO: 27869
  REGION 1..230: note = Description of Artificial Sequence: Synthetic polypeptide
  REGION 1..230: note = XENP022784 Full length HC

SEQ ID NO: 29557 - protein, 107 aa, synthetic construct; identical to SEQ ID NO: 26558
  REGION 1..107: note = Description of Artificial Sequence: Synthetic polypeptide
  REGION 1..107: note = VL of XENP022784

SEQ ID NO: 29558 - protein, 11 aa, synthetic construct
  REGION 1..11: note = Description of Artificial Sequence: Synthetic peptide
  REGION 1..11: note = XENP022784 vlCDR1
QASQDISSLLA

SEQ ID NO: 29559 - protein, 7 aa, synthetic construct
  REGION 1..7: note = Description of Artificial Sequence: Synthetic peptide
  REGION 1..7: note = XENP022784 vlCDR2
AASSLQS

SEQ ID NO: 29560 - protein, 9 aa, synthetic construct
  REGION 1..9: note = Description of Artificial Sequence: Synthetic peptide
  REGION 1..9: note = XENP022784 vlCDR3
QQAESFPWT

SEQ ID NO: 29561 - protein, 214 aa, synthetic construct; identical to SEQ ID NO: 26557
  REGION 1..214: note = Description of Artificial Sequence: Synthetic polypeptide
  REGION 1..214: note = XENP022784 Full length light chain

SEQ ID NO: 29562 - protein, 125 aa, synthetic construct; identical to SEQ ID NO: 26563
  REGION 1..125: note = Description of Artificial Sequence: Synthetic polypeptide
  REGION 1..125: note = VH of XENP023088

SEQ ID NO: 29563 - protein, 5 aa, synthetic construct
  REGION 1..5: note = Description of Artificial Sequence: Synthetic peptide
  REGION 1..5: note = XENP023088 vhCDR1
GYYMH

SEQ ID NO: 29564 - protein, 17 aa, synthetic construct
  REGION 1..17: note = Description of Artificial Sequence: Synthetic peptide
  REGION 1..17: note = XENP023088 vhCDR2
WINPHSGETIYAQKFQG

SEQ ID NO: 29565 - protein, 16 aa, synthetic construct
  REGION 1..16: note = Description of Artificial Sequence: Synthetic peptide
  REGION 1..16: note = XENP023088 vhCDR3
TYYYDTSGYYHDAFDV

SEQ ID NO: 29566 - protein, 230 aa, synthetic construct; identical to SEQ ID NO: 28081
  REGION 1..230: note = Description of Artificial Sequence: Synthetic polypeptide
  REGION 1..230: note = XENP023088 Full length HC

SEQ ID NO: 29567 - protein, 107 aa, synthetic construct; identical to SEQ ID NO: 26298
  REGION 1..107: note = Description of Artificial Sequence: Synthetic polypeptide
  REGION 1..107: note = VL of XENP023088

SEQ ID NO: 29568 - protein, 11 aa, synthetic construct
  REGION 1..11: note = Description of Artificial Sequence: Synthetic peptide
  REGION 1..11: note = XENP023088 vlCDR1
RASQGISRLLA

SEQ ID NO: 29569 - protein, 7 aa, synthetic construct
  REGION 1..7: note = Description of Artificial Sequence: Synthetic peptide
  REGION 1..7: note = XENP023088 vlCDR2
VASSLQS

SEQ ID NO: 29570 - protein, 9 aa, synthetic construct
  REGION 1..9: note = Description of Artificial Sequence: Synthetic peptide
  REGION 1..9: note = XENP023088 vlCDR3
QQANSFPWT

SEQ ID NO: 29571 - protein, 214 aa, synthetic construct; identical to SEQ ID NO: 26297
  REGION 1..214: note = Description of Artificial Sequence: Synthetic polypeptide
  REGION 1..214: note = XENP023088 Full length light chain

SEQ ID NO: 29572 - protein, 125 aa, synthetic construct; identical to SEQ ID NO: 26563
  REGION 1..125: note = Description of Artificial Sequence: Synthetic polypeptide
  REGION 1..125: note = VH of XENP023409

SEQ ID NO: 29573 - protein, 5 aa, synthetic construct
  REGION 1..5: note = Description of Artificial Sequence: Synthetic peptide
  REGION 1..5: note = XENP023409 vhCDR1
GYYMH

SEQ ID NO: 29574 - protein, 17 aa, synthetic construct
  REGION 1..17: note = Description of Artificial Sequence: Synthetic peptide
  REGION 1..17: note = XENP023409 vhCDR2
WINPHSGETIYAQKFQG

SEQ ID NO: 29575 - protein, 16 aa, synthetic construct
  REGION 1..16: note = Description of Artificial Sequence: Synthetic peptide
  REGION 1..16: note = XENP023409 vhCDR3
TYYYDTSGYYHDAFDV

SEQ ID NO: 29576 - protein, 230 aa, synthetic construct; identical to SEQ ID NO: 28081
  REGION 1..230: note = Description of Artificial Sequence: Synthetic polypeptide
  REGION 1..230: note = XENP023409 Full length HC

SEQ ID NO: 29577 - protein, 107 aa, synthetic construct; identical to SEQ ID NO: 26498
  REGION 1..107: note = Description of Artificial Sequence: Synthetic polypeptide
  REGION 1..107: note = VL of XENP023409

SEQ ID NO: 29578 - protein, 11 aa, synthetic construct
  REGION 1..11: note = Description of Artificial Sequence: Synthetic peptide
  REGION 1..11: note = XENP023409 vlCDR1
QASQDISRLLA

SEQ ID NO: 29579 - protein, 7 aa, synthetic construct
  REGION 1..7: note = Description of Artificial Sequence: Synthetic peptide
  REGION 1..7: note = XENP023409 vlCDR2
VASSLQS

SEQ ID NO: 29580 - protein, 9 aa, synthetic construct
  REGION 1..9: note = Description of Artificial Sequence: Synthetic peptide
  REGION 1..9: note = XENP023409 vlCDR3
QQAESFPWT

SEQ ID NO: 29581 - protein, 214 aa, synthetic construct; identical to SEQ ID NO: 26497
  REGION 1..214: note = Description of Artificial Sequence: Synthetic polypeptide
  REGION 1..214: note = XENP023409 Full length light chain

SEQ ID NO: 29582 - protein, 125 aa, synthetic construct; identical to SEQ ID NO: 26293
  REGION 1..125: note = Description of Artificial Sequence: Synthetic polypeptide
  REGION 1..125: note = VH of XENP024352

SEQ ID NO: 29583 - protein, 5 aa, synthetic construct
  REGION 1..5: note = Description of Artificial Sequence: Synthetic peptide
  REGION 1..5: note = XENP024352 vhCDR1
GYYMH

SEQ ID NO: 29584 - protein, 17 aa, synthetic construct
  REGION 1..17: note = Description of Artificial Sequence: Synthetic peptide
  REGION 1..17: note = XENP024352 vhCDR2
WINPHSGGTNYAQKFQG

SEQ ID NO: 29585 - protein, 16 aa, synthetic construct
  REGION 1..16: note = Description of Artificial Sequence: Synthetic peptide
  REGION 1..16: note = XENP024352 vhCDR3
TYYYDSSGYYHDAFDI

SEQ ID NO: 29586 - protein, 20 aa, synthetic construct
  REGION 1..20: note = Description of Artificial Sequence: Synthetic peptide
  REGION 1..20: note = XENP024352 scFv linker
GKPGSGKPGSGKPGSGKPGS

SEQ ID NO: 29587 - protein, 107 aa, synthetic construct; identical to SEQ ID NO: 26298
  REGION 1..107: note = Description of Artificial Sequence: Synthetic polypeptide
  REGION 1..107: note = VL of XENP024352

SEQ ID NO: 29588 - protein, 11 aa, synthetic construct
  REGION 1..11: note = Description of Artificial Sequence: Synthetic peptide
  REGION 1..11: note = XENP024352 vlCDR1
RASQGISRLLA

SEQ ID NO: 29589 - protein, 7 aa, synthetic construct
  REGION 1..7: note = Description of Artificial Sequence: Synthetic peptide
  REGION 1..7: note = XENP024352 vlCDR2
VASSLQS

SEQ ID NO: 29590 - protein, 9 aa, synthetic construct
  REGION 1..9: note = Description of Artificial Sequence: Synthetic peptide
  REGION 1..9: note = XENP024352 vlCDR3
QQANSFPWT

SEQ ID NO: 29591 - protein, 254 aa, synthetic construct
  REGION 1..254: note = Description of Artificial Sequence: Synthetic polypeptide
  REGION 1..254: note = XENP024352 scFv
QVQLVQSGAEVKKPGASVKVSCKASGYTFTGYYMHWVRQAPGQGLEWMGWINPHSGGTNYAQKFQGRVTMTRDTSISTAYMELSRLRSDDTAVYYCARTYYYDSSGYYHDAFDIWGQGTMVTVSSGKPGSGKPGSGKPGSGKPGSDIQMTQSPSSVSASVGDRVTITCRASQGISRLLAWYQQKPGKAPKLLIYVASSLQSGVPSRFSGSGSGTDFTLTISSLQPEDFATYYCQQANSFPWTFGQGTKVEIKGS

SEQ ID NO: 29592 - protein, 125 aa, synthetic construct; identical to SEQ ID NO: 26293
  REGION 1..125: note = Description of Artificial Sequence: Synthetic polypeptide
  REGION 1..125: note = VH of XENP024353

SEQ ID NO: 29593 - protein, 5 aa, synthetic construct
  REGION 1..5: note = Description of Artificial Sequence: Synthetic peptide
  REGION 1..5: note = XENP024353 vhCDR1
GYYMH

SEQ ID NO: 29594 - protein, 17 aa, synthetic construct
  REGION 1..17: note = Description of Artificial Sequence: Synthetic peptide
  REGION 1..17: note = XENP024353 vhCDR2
WINPHSGGTNYAQKFQG

SEQ ID NO: 29595 - protein, 16 aa, synthetic construct
  REGION 1..16: note = Description of Artificial Sequence: Synthetic peptide
  REGION 1..16: note = XENP024353 vhCDR3
TYYYDSSGYYHDAFDI

SEQ ID NO: 29596 - protein, 20 aa, synthetic construct
  REGION 1..20: note = Description of Artificial Sequence: Synthetic peptide
  REGION 1..20: note = XENP024353 scFv linker
GKPGSGKPGSGKPGSGKPGS

SEQ ID NO: 29597 - protein, 107 aa, synthetic construct; identical to SEQ ID NO: 26298
  REGION 1..107: note = Description of Artificial Sequence: Synthetic polypeptide
  REGION 1..107: note = VL of XENP024353

SEQ ID NO: 29598 - protein, 11 aa, synthetic construct
  REGION 1..11: note = Description of Artificial Sequence: Synthetic peptide
  REGION 1..11: note = XENP024353 vlCDR1
RASQGISRLLA

SEQ ID NO: 29599 - protein, 7 aa, synthetic construct
  REGION 1..7: note = Description of Artificial Sequence: Synthetic peptide
  REGION 1..7: note = XENP024353 vlCDR2
VASSLQS

SEQ ID NO: 29600 - protein, 9 aa, synthetic construct
  REGION 1..9: note = Description of Artificial Sequence: Synthetic peptide
  REGION 1..9: note = XENP024353 vlCDR3
QQANSFPWT

SEQ ID NO: 29601 - protein, 254 aa, synthetic construct
  REGION 1..254: note = Description of Artificial Sequence: Synthetic polypeptide
  REGION 1..254: note = XENP024353 scFv
DIQMTQSPSSVSASVGDRVTITCRASQGISRLLAWYQQKPGKAPKLLIYVASSLQSGVPSRFSGSGSGTDFTLTISSLQPEDFATYYCQQANSFPWTFGQGTKVEIKGKPGSGKPGSGKPGSGKPGSQVQLVQSGAEVKKPGASVKVSCKASGYTFTGYYMHWVRQAPGQGLEWMGWINPHSGGTNYAQKFQGRVTMTRDTSISTAYMELSRLRSDDTAVYYCARTYYYDSSGYYHDAFDIWGQGTMVTVSSGS

SEQ ID NO: 29602 - protein, 125 aa, synthetic construct
  REGION 1..125: note = Description of Artificial Sequence: Synthetic polypeptide
  REGION 1..125: note = VH of XENP024354
QVQLVQSGAEVKKPGASVKVSCKASGYTFTGYYMHWVRQAPGQGLEWMGWINPHSGETNYAQKFQGRVTMTRDTSISTAYMELSSLRSEDTAVYYCARTYYYDTSGYYHDAFDVWGQGTMVTVSS

SEQ ID NO: 29603 - protein, 5 aa, synthetic construct
  REGION 1..5: note = Description of Artificial Sequence: Synthetic peptide
  REGION 1..5: note = XENP024354 vhCDR1
GYYMH

SEQ ID NO: 29604 - protein, 17 aa, synthetic construct
  REGION 1..17: note = Description of Artificial Sequence: Synthetic peptide
  REGION 1..17: note = XENP024354 vhCDR2
WINPHSGETNYAQKFQG

SEQ ID NO: 29605 - protein, 16 aa, synthetic construct
  REGION 1..16: note = Description of Artificial Sequence: Synthetic peptide
  REGION 1..16: note = XENP024354 vhCDR3
TYYYDTSGYYHDAFDV

SEQ ID NO: 29606 - protein, 20 aa, synthetic construct
  REGION 1..20: note = Description of Artificial Sequence: Synthetic peptide
  REGION 1..20: note = XENP024354 scFv linker
GKPGSGKPGSGKPGSGKPGS

SEQ ID NO: 29607 - protein, 107 aa, synthetic construct
  REGION 1..107: note = Description of Artificial Sequence: Synthetic polypeptide
  REGION 1..107: note = VL of XENP024354
DIQMTQSPSSVSASVGDRVTITCRASQDISRLLAWYQQKPGKAPKLLIYAASSLQSGVPSRFSGSGSGTDFTLTISSLQPEDFATYYCQQANSFPWTFGQGTKVEIK

SEQ ID NO: 29608 - protein, 11 aa, synthetic construct
  REGION 1..11: note = Description of Artificial Sequence: Synthetic peptide
  REGION 1..11: note = XENP024354 vlCDR1
RASQDISRLLA

SEQ ID NO: 29609 - protein, 7 aa, synthetic construct
  REGION 1..7: note = Description of Artificial Sequence: Synthetic peptide
  REGION 1..7: note = XENP024354 vlCDR2
AASSLQS

SEQ ID NO: 29610 - protein, 9 aa, synthetic construct
  REGION 1..9: note = Description of Artificial Sequence: Synthetic peptide
  REGION 1..9: note = XENP024354 vlCDR3
QQANSFPWT

SEQ ID NO: 29611 - protein, 254 aa, synthetic construct
  REGION 1..254: note = Description of Artificial Sequence: Synthetic polypeptide
  REGION 1..254: note = XENP024354 scFv
QVQLVQSGAEVKKPGASVKVSCKASGYTFTGYYMHWVRQAPGQGLEWMGWINPHSGETNYAQKFQGRVTMTRDTSISTAYMELSSLRSEDTAVYYCARTYYYDTSGYYHDAFDVWGQGTMVTVSSGKPGSGKPGSGKPGSGKPGSDIQMTQSPSSVSASVGDRVTITCRASQDISRLLAWYQQKPGKAPKLLIYAASSLQSGVPSRFSGSGSGTDFTLTISSLQPEDFATYYCQQANSFPWTFGQGTKVEIKGS

SEQ ID NO: 29612 - protein, 125 aa, synthetic construct; identical to SEQ ID NO: 29602
  REGION 1..125: note = Description of Artificial Sequence: Synthetic polypeptide
  REGION 1..125: note = VH of XENP024355

SEQ ID NO: 29613 - protein, 5 aa, synthetic construct
  REGION 1..5: note = Description of Artificial Sequence: Synthetic peptide
  REGION 1..5: note = XENP024355 vhCDR1
GYYMH

SEQ ID NO: 29614 - protein, 17 aa, synthetic construct
  REGION 1..17: note = Description of Artificial Sequence: Synthetic peptide
  REGION 1..17: note = XENP024355 vhCDR2
WINPHSGETNYAQKFQG

SEQ ID NO: 29615 - protein, 16 aa, synthetic construct
  REGION 1..16: note = Description of Artificial Sequence: Synthetic peptide
  REGION 1..16: note = XENP024355 vhCDR3
TYYYDTSGYYHDAFDV

SEQ ID NO: 29616 - protein, 20 aa, synthetic construct
  REGION 1..20: note = Description of Artificial Sequence: Synthetic peptide
  REGION 1..20: note = XENP024355 scFv linker
GKPGSGKPGSGKPGSGKPGS

SEQ ID NO: 29617 - protein, 107 aa, synthetic construct
  REGION 1..107: note = Description of Artificial Sequence: Synthetic polypeptide
  REGION 1..107: note = VL of XENP024355
DIQMTQSPSSVSASVGDRVTITCRASQDISRLLAWYQQKPGKAPKLLIYAASSLQSGVPSRFSGSGSGTDFTLTISSLQPEDFATYYCQQAQSFPWTFGQGTKVEIK

SEQ ID NO: 29618 - protein, 11 aa, synthetic construct
  REGION 1..11: note = Description of Artificial Sequence: Synthetic peptide
  REGION 1..11: note = XENP024355 vlCDR1
RASQDISRLLA

SEQ ID NO: 29619 - protein, 7 aa, synthetic construct
  REGION 1..7: note = Description of Artificial Sequence: Synthetic peptide
  REGION 1..7: note = XENP024355 vlCDR2
AASSLQS

SEQ ID NO: 29620 - protein, 9 aa, synthetic construct
  REGION 1..9: note = Description of Artificial Sequence: Synthetic peptide
  REGION 1..9: note = XENP024355 vlCDR3
QQAQSFPWT

SEQ ID NO: 29621 - protein, 254 aa, synthetic construct
  REGION 1..254: note = Description of Artificial Sequence: Synthetic polypeptide
  REGION 1..254: note = XENP024355 scFv
QVQLVQSGAEVKKPGASVKVSCKASGYTFTGYYMHWVRQAPGQGLEWMGWINPHSGETNYAQKFQGRVTMTRDTSISTAYMELSSLRSEDTAVYYCARTYYYDTSGYYHDAFDVWGQGTMVTVSSGKPGSGKPGSGKPGSGKPGSDIQMTQSPSSVSASVGDRVTITCRASQDISRLLAWYQQKPGKAPKLLIYAASSLQSGVPSRFSGSGSGTDFTLTISSLQPEDFATYYCQQAQSFPWTFGQGTKVEIKGS

SEQ ID NO: 29622 - protein, 125 aa, synthetic construct; identical to SEQ ID NO: 26563
  REGION 1..125: note = Description of Artificial Sequence: Synthetic polypeptide
  REGION 1..125: note = VH of XENP024356

SEQ ID NO: 29623 - protein, 5 aa, synthetic construct
  REGION 1..5: note = Description of Artificial Sequence: Synthetic peptide
  REGION 1..5: note = XENP024356 vhCDR1
GYYMH

SEQ ID NO: 29624 - protein, 17 aa, synthetic construct
  REGION 1..17: note = Description of Artificial Sequence: Synthetic peptide
  REGION 1..17: note = XENP024356 vhCDR2
WINPHSGETIYAQKFQG

SEQ ID NO: 29625 - protein, 16 aa, synthetic construct
  REGION 1..16: note = Description of Artificial Sequence: Synthetic peptide
  REGION 1..16: note = XENP024356 vhCDR3
TYYYDTSGYYHDAFDV

SEQ ID NO: 29626 - protein, 20 aa, synthetic construct
  REGION 1..20: note = Description of Artificial Sequence: Synthetic peptide
  REGION 1..20: note = XENP024356 scFv linker
GKPGSGKPGSGKPGSGKPGS

SEQ ID NO: 29627 - protein, 107 aa, synthetic construct; identical to SEQ ID NO: 29607
  REGION 1..107: note = Description of Artificial Sequence: Synthetic polypeptide
  REGION 1..107: note = VL of XENP024356

SEQ ID NO: 29628 - protein, 11 aa, synthetic construct
  REGION 1..11: note = Description of Artificial Sequence: Synthetic peptide
  REGION 1..11: note = XENP024356 vlCDR1
RASQDISRLLA

SEQ ID NO: 29629 - protein, 7 aa, synthetic construct
  REGION 1..7: note = Description of Artificial Sequence: Synthetic peptide
  REGION 1..7: note = XENP024356 vlCDR2
AASSLQS

SEQ ID NO: 29630 - protein, 9 aa, synthetic construct
  REGION 1..9: note = Description of Artificial Sequence: Synthetic peptide
  REGION 1..9: note = XENP024356 vlCDR3
QQANSFPWT

SEQ ID NO: 29631 - protein, 254 aa, synthetic construct
  REGION 1..254: note = Description of Artificial Sequence: Synthetic polypeptide
  REGION 1..254: note = XENP024356 scFv
QVQLVQSGAEVKKPGASVKVSCKASGYTFTGYYMHWVRQAPGQGLEWMGWINPHSGETIYAQKFQGRVTMTRDTSISTAYMELSSLRSEDTAVYYCARTYYYDTSGYYHDAFDVWGQGTMVTVSSGKPGSGKPGSGKPGSGKPGSDIQMTQSPSSVSASVGDRVTITCRASQDISRLLAWYQQKPGKAPKLLIYAASSLQSGVPSRFSGSGSGTDFTLTISSLQPEDFATYYCQQANSFPWTFGQGTKVEIKGS

SEQ ID NO: 29632 - protein, 125 aa, synthetic construct; identical to SEQ ID NO: 26563
  REGION 1..125: note = Description of Artificial Sequence: Synthetic polypeptide
  REGION 1..125: note = VH of XENP024357

SEQ ID NO: 29633 - protein, 5 aa, synthetic construct
  REGION 1..5: note = Description of Artificial Sequence: Synthetic peptide
  REGION 1..5: note = XENP024357 vhCDR1
GYYMH

SEQ ID NO: 29634 - protein, 17 aa, synthetic construct
  REGION 1..17: note = Description of Artificial Sequence: Synthetic peptide
  REGION 1..17: note = XENP024357 vhCDR2
WINPHSGETIYAQKFQG

SEQ ID NO: 29635 - protein, 16 aa, synthetic construct
  REGION 1..16: note = Description of Artificial Sequence: Synthetic peptide
  REGION 1..16: note = XENP024357 vhCDR3
TYYYDTSGYYHDAFDV

SEQ ID NO: 29636 - protein, 20 aa, synthetic construct
  REGION 1..20: note = Description of Artificial Sequence: Synthetic peptide
  REGION 1..20: note = XENP024357 scFv linker
GKPGSGKPGSGKPGSGKPGS

SEQ ID NO: 29637 - protein, 107 aa, synthetic construct; identical to SEQ ID NO: 29617
  REGION 1..107: note = Description of Artificial Sequence: Synthetic polypeptide
  REGION 1..107: note = VL of XENP024357

SEQ ID NO: 29638 - protein, 11 aa, synthetic construct
  REGION 1..11: note = Description of Artificial Sequence: Synthetic peptide
  REGION 1..11: note = XENP024357 vlCDR1
RASQDISRLLA

SEQ ID NO: 29639 - protein, 7 aa, synthetic construct
  REGION 1..7: note = Description of Artificial Sequence: Synthetic peptide
  REGION 1..7: note = XENP024357 vlCDR2
AASSLQS

SEQ ID NO: 29640 - protein, 9 aa, synthetic construct
  REGION 1..9: note = Description of Artificial Sequence: Synthetic peptide
  REGION 1..9: note = XENP024357 vlCDR3
QQAQSFPWT

SEQ ID NO: 29641 - protein, 254 aa, synthetic construct
  REGION 1..254: note = Description of Artificial Sequence: Synthetic polypeptide
  REGION 1..254: note = XENP024357 scFv
QVQLVQSGAEVKKPGASVKVSCKASGYTFTGYYMHWVRQAPGQGLEWMGWINPHSGETIYAQKFQGRVTMTRDTSISTAYMELSSLRSEDTAVYYCARTYYYDTSGYYHDAFDVWGQGTMVTVSSGKPGSGKPGSGKPGSGKPGSDIQMTQSPSSVSASVGDRVTITCRASQDISRLLAWYQQKPGKAPKLLIYAASSLQSGVPSRFSGSGSGTDFTLTISSLQPEDFATYYCQQAQSFPWTFGQGTKVEIKGS

SEQ ID NO: 29642 - protein, 125 aa, synthetic construct; identical to SEQ ID NO: 29602
  REGION 1..125: note = Description of Artificial Sequence: Synthetic polypeptide
  REGION 1..125: note = VH of XENP024609

SEQ ID NO: 29643 - protein, 5 aa, synthetic construct
  REGION 1..5: note = Description of Artificial Sequence: Synthetic peptide
  REGION 1..5: note = XENP024609 vhCDR1
GYYMH

SEQ ID NO: 29644 - protein, 17 aa, synthetic construct
  REGION 1..17: note = Description of Artificial Sequence: Synthetic peptide
  REGION 1..17: note = XENP024609 vhCDR2
WINPHSGETNYAQKFQG

SEQ ID NO: 29645 - protein, 16 aa, synthetic construct
  REGION 1..16: note = Description of Artificial Sequence: Synthetic peptide
  REGION 1..16: note = XENP024609 vhCDR3
TYYYDTSGYYHDAFDV

SEQ ID NO: 29646 - protein, 20 aa, synthetic construct
  REGION 1..20: note = Description of Artificial Sequence: Synthetic peptide
  REGION 1..20: note = XENP024609 scFv linker
GKPGSGKPGSGKPGSGKPGS

SEQ ID NO: 29647 - protein, 107 aa, synthetic construct; identical to SEQ ID NO: 29617
  REGION 1..107: note = Description of Artificial Sequence: Synthetic polypeptide
  REGION 1..107: note = VL of XENP024609

SEQ ID NO: 29648 - protein, 11 aa, synthetic construct
  REGION 1..11: note = Description of Artificial Sequence: Synthetic peptide
  REGION 1..11: note = XENP024609 vlCDR1
RASQDISRLLA

SEQ ID NO: 29649 - protein, 7 aa, synthetic construct
  REGION 1..7: note = Description of Artificial Sequence: Synthetic peptide
  REGION 1..7: note = XENP024609 vlCDR2
AASSLQS

SEQ ID NO: 29650 - protein, 9 aa, synthetic construct
  REGION 1..9: note = Description of Artificial Sequence: Synthetic peptide
  REGION 1..9: note = XENP024609 vlCDR3
QQAQSFPWT

SEQ ID NO: 29651 - protein, 254 aa, synthetic construct
  REGION 1..254: note = Description of Artificial Sequence: Synthetic polypeptide
  REGION 1..254: note = XENP024609 scFv
DIQMTQSPSSVSASVGDRVTITCRASQDISRLLAWYQQKPGKAPKLLIYAASSLQSGVPSRFSGSGSGTDFTLTISSLQPEDFATYYCQQAQSFPWTFGQGTKVEIKGKPGSGKPGSGKPGSGKPGSQVQLVQSGAEVKKPGASVKVSCKASGYTFTGYYMHWVRQAPGQGLEWMGWINPHSGETNYAQKFQGRVTMTRDTSISTAYMELSSLRSEDTAVYYCARTYYYDTSGYYHDAFDVWGQGTMVTVSSGS

SEQ ID NO: 29652 - protein, 125 aa, synthetic construct
  REGION 1..125: note = Description of Artificial Sequence: Synthetic polypeptide
  REGION 1..125: note = VH of XENP024689
QVQLVQSGAEVKKPGASVKVSCKASGYTFTGYYMHWVRQAPGQGLEWMGWINPHSGGTNYAQKFQGRVTMTRDTSISTAYMELSSLRSEDTAVYYCARTYYYDTSGYYHDAFDVWGQGTMVTVSS

SEQ ID NO: 29653 - protein, 5 aa, synthetic construct
  REGION 1..5: note = Description of Artificial Sequence: Synthetic peptide
  REGION 1..5: note = XENP024689 vhCDR1
GYYMH

SEQ ID NO: 29654 - protein, 17 aa, synthetic construct
  REGION 1..17: note = Description of Artificial Sequence: Synthetic peptide
  REGION 1..17: note = XENP024689 vhCDR2
WINPHSGGTNYAQKFQG

SEQ ID NO: 29655 - protein, 16 aa, synthetic construct
  REGION 1..16: note = Description of Artificial Sequence: Synthetic peptide
  REGION 1..16: note = XENP024689 vhCDR3
TYYYDTSGYYHDAFDV

SEQ ID NO: 29656 - protein, 20 aa, synthetic construct
  REGION 1..20: note = Description of Artificial Sequence: Synthetic peptide
  REGION 1..20: note = XENP024689 scFv linker
GKPGSGKPGSGKPGSGKPGS

SEQ ID NO: 29657 - protein, 107 aa, synthetic construct; identical to SEQ ID NO: 29617
  REGION 1..107: note = Description of Artificial Sequence: Synthetic polypeptide
  REGION 1..107: note = VL of XENP024689

SEQ ID NO: 29658 - protein, 11 aa, synthetic construct
  REGION 1..11: note = Description of Artificial Sequence: Synthetic peptide
  REGION 1..11: note = XENP024689 vlCDR1
RASQDISRLLA

SEQ ID NO: 29659 - protein, 7 aa, synthetic construct
  REGION 1..7: note = Description of Artificial Sequence: Synthetic peptide
  REGION 1..7: note = XENP024689 vlCDR2
AASSLQS

SEQ ID NO: 29660 - protein, 9 aa, synthetic construct
  REGION 1..9: note = Description of Artificial Sequence: Synthetic peptide
  REGION 1..9: note = XENP024689 vlCDR3
QQAQSFPWT

SEQ ID NO: 29661 - protein, 254 aa, synthetic construct
  REGION 1..254: note = Description of Artificial Sequence: Synthetic polypeptide
  REGION 1..254: note = XENP024689 scFv
DIQMTQSPSSVSASVGDRVTITCRASQDISRLLAWYQQKPGKAPKLLIYAASSLQSGVPSRFSGSGSGTDFTLTISSLQPEDFATYYCQQAQSFPWTFGQGTKVEIKGKPGSGKPGSGKPGSGKPGSQVQLVQSGAEVKKPGASVKVSCKASGYTFTGYYMHWVRQAPGQGLEWMGWINPHSGGTNYAQKFQGRVTMTRDTSISTAYMELSSLRSEDTAVYYCARTYYYDTSGYYHDAFDVWGQGTMVTVSSGS

SEQ ID NO: 29662 - protein, 125 aa, synthetic construct
  REGION 1..125: note = Description of Artificial Sequence: Synthetic polypeptide
  REGION 1..125: note = VH of XENP024690
QVQLVQSGAEVKKPGASVKVSCKASGYTFTGYYMHWVRQAPGQGLEWMGWINPHSGETNYAQKFQGRVTMTRDTSISTAYMELSRLRSDDTAVYYCARTYYYDTSGYYHDAFDVWGQGTMVTVSS

SEQ ID NO: 29663 - protein, 5 aa, synthetic construct
  REGION 1..5: note = Description of Artificial Sequence: Synthetic peptide
  REGION 1..5: note = XENP024690 vhCDR1
GYYMH

SEQ ID NO: 29664 - protein, 17 aa, synthetic construct
  REGION 1..17: note = Description of Artificial Sequence: Synthetic peptide
  REGION 1..17: note = XENP024690 vhCDR2
WINPHSGETNYAQKFQG

SEQ ID NO: 29665 - protein, 16 aa, synthetic construct
  REGION 1..16: note = Description of Artificial Sequence: Synthetic peptide
  REGION 1..16: note = XENP024690 vhCDR3
TYYYDTSGYYHDAFDV

SEQ ID NO: 29666 - protein, 20 aa, synthetic construct
  REGION 1..20: note = Description of Artificial Sequence: Synthetic peptide
  REGION 1..20: note = XENP024690 scFv linker
GKPGSGKPGSGKPGSGKPGS

SEQ ID NO: 29667 - protein, 107 aa, synthetic construct; identical to SEQ ID NO: 29617
  REGION 1..107: note = Description of Artificial Sequence: Synthetic polypeptide
  REGION 1..107: note = VL of XENP024690

SEQ ID NO: 29668 - protein, 11 aa, synthetic construct
  REGION 1..11: note = Description of Artificial Sequence: Synthetic peptide
  REGION 1..11: note = XENP024690 vlCDR1
RASQDISRLLA

SEQ ID NO: 29669 - protein, 7 aa, synthetic construct
  REGION 1..7: note = Description of Artificial Sequence: Synthetic peptide
  REGION 1..7: note = XENP024690 vlCDR2
AASSLQS

SEQ ID NO: 29670 - protein, 9 aa, synthetic construct
  REGION 1..9: note = Description of Artificial Sequence: Synthetic peptide
  REGION 1..9: note = XENP024690 vlCDR3
QQAQSFPWT

SEQ ID NO: 29671 - protein, 254 aa, synthetic construct
  REGION 1..254: note = Description of Artificial Sequence: Synthetic polypeptide
  REGION 1..254: note = XENP024690 scFv
DIQMTQSPSSVSASVGDRVTITCRASQDISRLLAWYQQKPGKAPKLLIYAASSLQSGVPSRFSGSGSGTDFTLTISSLQPEDFATYYCQQAQSFPWTFGQGTKVEIKGKPGSGKPGSGKPGSGKPGSQVQLVQSGAEVKKPGASVKVSCKASGYTFTGYYMHWVRQAPGQGLEWMGWINPHSGETNYAQKFQGRVTMTRDTSISTAYMELSRLRSDDTAVYYCARTYYYDTSGYYHDAFDVWGQGTMVTVSSGS

SEQ ID NO: 29672 - protein, 125 aa, synthetic construct
  REGION 1..125: note = Description of Artificial Sequence: Synthetic polypeptide
  REGION 1..125: note = VH of XENP024691
QVQLVQSGAEVKKPGASVKVSCKASGYTFTGYYMHWVRQAPGQGLEWMGWINPHSGGTNYAQKFQGRVTMTRDTSISTAYMELSRLRSDDTAVYYCARTYYYDTSGYYHDAFDVWGQGTMVTVSS

SEQ ID NO: 29673 - protein, 5 aa, synthetic construct
  REGION 1..5: note = Description of Artificial Sequence: Synthetic peptide
  REGION 1..5: note = XENP024691 vhCDR1
GYYMH

SEQ ID NO: 29674 - protein, 17 aa, synthetic construct
  REGION 1..17: note = Description of Artificial Sequence: Synthetic peptide
  REGION 1..17: note = XENP024691 vhCDR2
WINPHSGGTNYAQKFQG

SEQ ID NO: 29675 - protein, 16 aa, synthetic construct
  REGION 1..16: note = Description of Artificial Sequence: Synthetic peptide
  REGION 1..16: note = XENP024691 vhCDR3
TYYYDTSGYYHDAFDV

SEQ ID NO: 29676 - protein, 20 aa, synthetic construct
  REGION 1..20: note = Description of Artificial Sequence: Synthetic peptide
  REGION 1..20: note = XENP024691 scFv linker
GKPGSGKPGSGKPGSGKPGS

SEQ ID NO: 29677 - protein, 107 aa, synthetic construct; identical to SEQ ID NO: 29617
  REGION 1..107: note = Description of Artificial Sequence: Synthetic polypeptide
  REGION 1..107: note = VL of XENP024691

SEQ ID NO: 29678 - protein, 11 aa, synthetic construct
  REGION 1..11: note = Description of Artificial Sequence: Synthetic peptide
  REGION 1..11: note = XENP024691 vlCDR1
RASQDISRLLA

SEQ ID NO: 29679 - protein, 7 aa, synthetic construct
  REGION 1..7: note = Description of Artificial Sequence: Synthetic peptide
  REGION 1..7: note = XENP024691 vlCDR2
AASSLQS

SEQ ID NO: 29680 - protein, 9 aa, synthetic construct
  REGION 1..9: note = Description of Artificial Sequence: Synthetic peptide
  REGION 1..9: note = XENP024691 vlCDR3
QQAQSFPWT

SEQ ID NO: 29681 - protein, 254 aa, synthetic construct
  REGION 1..254: note = Description of Artificial Sequence: Synthetic polypeptide
  REGION 1..254: note = XENP024691 scFv
DIQMTQSPSSVSASVGDRVTITCRASQDISRLLAWYQQKPGKAPKLLIYAASSLQSGVPSRFSGSGSGTDFTLTISSLQPEDFATYYCQQAQSFPWTFGQGTKVEIKGKPGSGKPGSGKPGSGKPGSQVQLVQSGAEVKKPGASVKVSCKASGYTFTGYYMHWVRQAPGQGLEWMGWINPHSGGTNYAQKFQGRVTMTRDTSISTAYMELSRLRSDDTAVYYCARTYYYDTSGYYHDAFDVWGQGTMVTVSSGS

SEQ ID NO: 29682 - protein, 125 aa, synthetic construct
  REGION 1..125: note = Description of Artificial Sequence: Synthetic polypeptide
  REGION 1..125: note = VH of XENP024692
QVQLVQSGAEVKKPGASVKVSCKASGYTFTGYYMHWVRQAPGQGLEWMGWINPHSGGTNYAQKFQGRVTMTRDTSISTAYMELSRLRSDDTAVYYCARTYYYDSSGYYHDAFDVWGQGTMVTVSS

SEQ ID NO: 29683 - protein, 5 aa, synthetic construct
  REGION 1..5: note = Description of Artificial Sequence: Synthetic peptide
  REGION 1..5: note = XENP024692 vhCDR1
GYYMH

SEQ ID NO: 29684 - protein, 17 aa, synthetic construct
  REGION 1..17: note = Description of Artificial Sequence: Synthetic peptide
  REGION 1..17: note = XENP024692 vhCDR2
WINPHSGGTNYAQKFQG

SEQ ID NO: 29685 - protein, 16 aa, synthetic construct
  REGION 1..16: note = Description of Artificial Sequence: Synthetic peptide
  REGION 1..16: note = XENP024692 vhCDR3
TYYYDSSGYYHDAFDV

SEQ ID NO: 29686 - protein, 20 aa, synthetic construct
  REGION 1..20: note = Description of Artificial Sequence: Synthetic peptide
  REGION 1..20: note = XENP024692 scFv linker
GKPGSGKPGSGKPGSGKPGS

SEQ ID NO: 29687 - protein, 107 aa, synthetic construct; identical to SEQ ID NO: 29617
  REGION 1..107: note = Description of Artificial Sequence: Synthetic polypeptide
  REGION 1..107: note = VL of XENP024692

SEQ ID NO: 29688 - protein, 11 aa, synthetic construct
  REGION 1..11: note = Description of Artificial Sequence: Synthetic peptide
  REGION 1..11: note = XENP024692 vlCDR1
RASQDISRLLA

SEQ ID NO: 29689 - protein, 7 aa, synthetic construct
  REGION 1..7: note = Description of Artificial Sequence: Synthetic peptide
  REGION 1..7: note = XENP024692 vlCDR2
AASSLQS

SEQ ID NO: 29690 - protein, 9 aa, synthetic construct
  REGION 1..9: note = Description of Artificial Sequence: Synthetic peptide
  REGION 1..9: note = XENP024692 vlCDR3
QQAQSFPWT

SEQ ID NO: 29691 - protein, 254 aa, synthetic construct
  REGION 1..254: note = Description of Artificial Sequence: Synthetic polypeptide
  REGION 1..254: note = XENP024692 scFv
DIQMTQSPSSVSASVGDRVTITCRASQDISRLLAWYQQKPGKAPKLLIYAASSLQSGVPSRFSGSGSGTDFTLTISSLQPEDFATYYCQQAQSFPWTFGQGTKVEIKGKPGSGKPGSGKPGSGKPGSQVQLVQSGAEVKKPGASVKVSCKASGYTFTGYYMHWVRQAPGQGLEWMGWINPHSGGTNYAQKFQGRVTMTRDTSISTAYMELSRLRSDDTAVYYCARTYYYDSSGYYHDAFDVWGQGTMVTVSSGS

SEQ ID NO: 29692 - protein, 125 aa, synthetic construct; identical to SEQ ID NO: 29602
  REGION 1..125: note = Description of Artificial Sequence: Synthetic polypeptide
  REGION 1..125: note = VH of XENP024693

SEQ ID NO: 29693 - protein, 5 aa, synthetic construct
  REGION 1..5: note = Description of Artificial Sequence: Synthetic peptide
  REGION 1..5: note = XENP024693 vhCDR1
GYYMH

SEQ ID NO: 29694 - protein, 17 aa, synthetic construct
  REGION 1..17: note = Description of Artificial Sequence: Synthetic peptide
  REGION 1..17: note = XENP024693 vhCDR2
WINPHSGETNYAQKFQG

SEQ ID NO: 29695 - protein, 16 aa, synthetic construct
  REGION 1..16: note = Description of Artificial Sequence: Synthetic peptide
  REGION 1..16: note = XENP024693 vhCDR3
TYYYDTSGYYHDAFDV

SEQ ID NO: 29696 - protein, 20 aa, synthetic construct
  REGION 1..20: note = Description of Artificial Sequence: Synthetic peptide
  REGION 1..20: note = XENP024693 scFv linker
GKPGSGKPGSGKPGSGKPGS

SEQ ID NO: 29697 - protein, 107 aa, synthetic construct
  REGION 1..107: note = Description of Artificial Sequence: Synthetic polypeptide
  REGION 1..107: note = VL of XENP024693
DIQMTQSPSSVSASVGDRVTITCRASQSISRLLAWYQQKPGKAPKLLIYAASSLQSGVPSRFSGSGSGTDFTLTISSLQPEDFATYYCQQAQSFPWTFGQGTKVEIK

SEQ ID NO: 29698 - protein, 11 aa, synthetic construct
  REGION 1..11: note = Description of Artificial Sequence: Synthetic peptide
  REGION 1..11: note = XENP024693 vlCDR1
RASQSISRLLA

SEQ ID NO: 29699 - protein, 7 aa, synthetic construct
  REGION 1..7: note = Description of Artificial Sequence: Synthetic peptide
  REGION 1..7: note = XENP024693 vlCDR2
AASSLQS

SEQ ID NO: 29700 - protein, 9 aa, synthetic construct
  REGION 1..9: note = Description of Artificial Sequence: Synthetic peptide
  REGION 1..9: note = XENP024693 vlCDR3
QQAQSFPWT

SEQ ID NO: 29701 - protein, 254 aa, synthetic construct
  REGION 1..254: note = Description of Artificial Sequence: Synthetic polypeptide
  REGION 1..254: note = XENP024693 scFv
DIQMTQSPSSVSASVGDRVTITCRASQSISRLLAWYQQKPGKAPKLLIYAASSLQSGVPSRFSGSGSGTDFTLTISSLQPEDFATYYCQQAQSFPWTFGQGTKVEIKGKPGSGKPGSGKPGSGKPGSQVQLVQSGAEVKKPGASVKVSCKASGYTFTGYYMHWVRQAPGQGLEWMGWINPHSGETNYAQKFQGRVTMTRDTSISTAYMELSSLRSEDTAVYYCARTYYYDTSGYYHDAFDVWGQGTMVTVSSGS

SEQ ID NO: 29702 - protein, 125 aa, synthetic construct; identical to SEQ ID NO: 29602
  REGION 1..125: note = Description of Artificial Sequence: Synthetic polypeptide
  REGION 1..125: note = VH of XENP024694

SEQ ID NO: 29703 - protein, 5 aa, synthetic construct
  REGION 1..5: note = Description of Artificial Sequence: Synthetic peptide
  REGION 1..5: note = XENP024694 vhCDR1
GYYMH

SEQ ID NO: 29704 - protein, 17 aa, synthetic construct
  REGION 1..17: note = Description of Artificial Sequence: Synthetic peptide
  REGION 1..17: note = XENP024694 vhCDR2
WINPHSGETNYAQKFQG

SEQ ID NO: 29705 - protein, 16 aa, synthetic construct
  REGION 1..16: note = Description of Artificial Sequence: Synthetic peptide
  REGION 1..16: note = XENP024694 vhCDR3
TYYYDTSGYYHDAFDV

SEQ ID NO: 29706 - protein, 20 aa, synthetic construct
  REGION 1..20: note = Description of Artificial Sequence: Synthetic peptide
  REGION 1..20: note = XENP024694 scFv linker
GKPGSGKPGSGKPGSGKPGS

SEQ ID NO: 29707 - protein, 107 aa, synthetic construct
  REGION 1..107: note = Description of Artificial Sequence: Synthetic polypeptide
  REGION 1..107: note = VL of XENP024694
DIQMTQSPSSVSASVGDRVTITCRASQDISRLLAWYQQKPGKAPKLLIYSASSLQSGVPSRFSGSGSGTDFTLTISSLQPEDFATYYCQQAQSFPWTFGQGTKVEIK

SEQ ID NO: 29708 - protein, 11 aa, synthetic construct
  REGION 1..11: note = Description of Artificial Sequence: Synthetic peptide
  REGION 1..11: note = XENP024694 vlCDR1
RASQDISRLLA

SEQ ID NO: 29709 - protein, 7 aa, synthetic construct
  REGION 1..7: note = Description of Artificial Sequence: Synthetic peptide
  REGION 1..7: note = XENP024694 vlCDR2
SASSLQS

SEQ ID NO: 29710 - protein, 9 aa, synthetic construct
  REGION 1..9: note = Description of Artificial Sequence: Synthetic peptide
  REGION 1..9: note = XENP024694 vlCDR3
QQAQSFPWT

SEQ ID NO: 29711 - protein, 254 aa, synthetic construct
  REGION 1..254: note = Description of Artificial Sequence: Synthetic polypeptide
  REGION 1..254: note = XENP024694 scFv
DIQMTQSPSSVSASVGDRVTITCRASQDISRLLAWYQQKPGKAPKLLIYSASSLQSGVPSRFSGSGSGTDFTLTISSLQPEDFATYYCQQAQSFPWTFGQGTKVEIKGKPGSGKPGSGKPGSGKPGSQVQLVQSGAEVKKPGASVKVSCKASGYTFTGYYMHWVRQAPGQGLEWMGWINPHSGETNYAQKFQGRVTMTRDTSISTAYMELSSLRSEDTAVYYCARTYYYDTSGYYHDAFDVWGQGTMVTVSSGS

SEQ ID NO: 29712 - protein, 454 aa, synthetic construct; identical to SEQ ID NO: 26362
  REGION 1..454: note = Description of Artificial Sequence: Synthetic polypeptide
  REGION 1..454: note = XENP022730 [ICOS]_H0L0_Fab-1G6_L1.194_H1.279 Fab-Fc Heavy Chain

SEQ ID NO: 29713 - protein, 480 aa, synthetic construct; identical to SEQ ID NO: 2930
  REGION 1..480: note = Description of Artificial Sequence: Synthetic polypeptide
  REGION 1..480: note = XENP022730 [ICOS]_H0L0_Fab-1G6_L1.194_H1.279 scFv-Fc Heavy Chain

SEQ ID NO: 29714 - protein, 214 aa, synthetic construct; identical to SEQ ID NO: 26297
  REGION 1..214: note = Description of Artificial Sequence: Synthetic polypeptide
  REGION 1..214: note = XENP022730 [ICOS]_H0L0_Fab-1G6_L1.194_H1.279 Light Chain

SEQ ID NO: 29715 - protein, 447 aa, synthetic construct; identical to SEQ ID NO: 26382
  REGION 1..447: note = Description of Artificial Sequence: Synthetic polypeptide
  REGION 1..447: note = XENP023377 11D4[OX40]_H0L0_Fab-1G6_L1.194_H1.279_scFv Fab-Fc Heavy Chain

SEQ ID NO: 29716 - protein, 480 aa, synthetic construct; identical to SEQ ID NO: 2870
  REGION 1..480: note = Description of Artificial Sequence: Synthetic polypeptide
  REGION 1..480: note = XENP023377 11D4[OX40]_H0L0_Fab-1G6_L1.194_H1.279_scFv scFv-Fc Heavy Chain

SEQ ID NO: 29717 - protein, 214 aa, synthetic construct; identical to SEQ ID NO: 26277
  REGION 1..214: note = Description of Artificial Sequence: Synthetic polypeptide
  REGION 1..214: note = XENP023377 11D4[OX40]_H0L0_Fab-1G6_L1.194_H1.279_scFv Light Chain

SEQ ID NO: 29718 - protein, 451 aa, synthetic construct; identical to SEQ ID NO: 26402
  REGION 1..451: note = Description of Artificial Sequence: Synthetic polypeptide
  REGION 1..451: note = XENP023378 1D8[GITR]_H0L0_Fab-1G6_L1.194_H1.279_scFv Fab-Fc Heavy Chain

SEQ ID NO: 29719 - protein, 480 aa, synthetic construct; identical to SEQ ID NO: 2870
  REGION 1..480: note = Description of Artificial Sequence: Synthetic polypeptide
  REGION 1..480: note = XENP023378 1D8[GITR]_H0L0_Fab-1G6_L1.194_H1.279_scFv scFv-Fc Heavy Chain

SEQ ID NO: 29720 - protein, 219 aa, synthetic construct; identical to SEQ ID NO: 26287
  REGION 1..219: note = Description of Artificial Sequence: Synthetic polypeptide
  REGION 1..219: note = XENP023378 1D8[GITR]_H0L0_Fab-1G6_L1.194_H1.279_scFv Light Chain

SEQ ID NO: 29721 - protein, 450 aa, synthetic construct; identical to SEQ ID NO: 26422
  REGION 1..450: note = Description of Artificial Sequence: Synthetic polypeptide
  REGION 1..450: note = XENP023379 20H4.9[4-1BB]_H0L0_Fab-1G6_L1.194_H1.279_scFv Fab-Fc Heavy Chain

SEQ ID NO: 29722 - protein, 480 aa, synthetic construct; identical to SEQ ID NO: 2870
  REGION 1..480: note = Description of Artificial Sequence: Synthetic polypeptide
  REGION 1..480: note = XENP023379 20H4.9[4-1BB]_H0L0_Fab-1G6_L1.194_H1.279_scFv scFv-Fc Heavy Chain

SEQ ID NO: 29723 - protein, 216 aa, synthetic construct; identical to SEQ ID NO: 26267
  REGION 1..216: note = Description of Artificial Sequence: Synthetic polypeptide
  REGION 1..216: note = XENP023379 20H4.9[4-1BB]_H0L0_Fab-1G6_L1.194_H1.279_scFv Light Chain

SEQ ID NO: 29724 - protein, 454 aa, synthetic construct; identical to SEQ ID NO: 26442
  REGION 1..454: note = Description of Artificial Sequence: Synthetic polypeptide
  REGION 1..454: note = XENP020896 [ICOS]_H0L0_Fab-1G6_L1.194_H1.279 Fab-Fc Heavy Chain

SEQ ID NO: 29725 - protein, 480 aa, synthetic construct; identical to SEQ ID NO: 2870
  REGION 1..480: note = Description of Artificial Sequence: Synthetic polypeptide
  REGION 1..480: note = XENP020896 [ICOS]_H0L0_Fab-1G6_L1.194_H1.279 scFv-Fc Heavy Chain

SEQ ID NO: 29726 - protein, 214 aa, synthetic construct; identical to SEQ ID NO: 26297
  REGION 1..214: note = Description of Artificial Sequence: Synthetic polypeptide
  REGION 1..214: note = XENP020896 [ICOS]_H0L0_Fab-1G6_L1.194_H1.279 Light Chain

SEQ ID NO: 29727 - protein, 454 aa, synthetic construct; identical to SEQ ID NO: 26442
  REGION 1..454: note = Description of Artificial Sequence: Synthetic polypeptide
  REGION 1..454: note = XENP022433 [ICOS]_H0_L0.7_Fab-1G6_L1.194_H1.279 Fab-Fc Heavy Chain

SEQ ID NO: 29728 - protein, 480 aa, synthetic construct; identical to SEQ ID NO: 2870
  REGION 1..480: note = Description of Artificial Sequence: Synthetic polypeptide
  REGION 1..480: note = XENP022433 [ICOS]_H0_L0.7_Fab-1G6_L1.194_H1.279 scFv-Fc Heavy Chain

SEQ ID NO: 29729 - protein, 214 aa, synthetic construct; identical to SEQ ID NO: 26477
  REGION 1..214: note = Description of Artificial Sequence: Synthetic polypeptide
  REGION 1..214: note = XENP022433 [ICOS]_H0_L0.7_Fab-1G6_L1.194_H1.279 Light Chain

SEQ ID NO: 29730 - protein, 454 aa, synthetic construct; identical to SEQ ID NO: 26442
  REGION 1..454: note = Description of Artificial Sequence: Synthetic polypeptide
  REGION 1..454: note = XENP022744 [ICOS]_H0_L0.34_Fab-1G6_L1.194_H1.279 Fab-Fc Heavy Chain

SEQ ID NO: 29731 - protein, 480 aa, synthetic construct; identical to SEQ ID NO: 2870
  REGION 1..480: note = Description of Artificial Sequence: Synthetic polypeptide
  REGION 1..480: note = XENP022744 [ICOS]_H0_L0.34_Fab-1G6_L1.194_H1.279 scFv-Fc Heavy Chain

SEQ ID NO: 29732 - protein, 214 aa, synthetic construct; identical to SEQ ID NO: 26497
  REGION 1..214: note = Description of Artificial Sequence: Synthetic polypeptide
  REGION 1..214: note = XENP022744 [ICOS]_H0_L0.34_Fab-1G6_L1.194_H1.279 Light Chain

SEQ ID NO: 29733 - protein, 454 aa, synthetic construct; identical to SEQ ID NO: 26442
  REGION 1..454: note = Description of Artificial Sequence: Synthetic polypeptide
  REGION 1..454: note = XENP022746 [ICOS]_H0_L0.36_Fab-1G6_L1.194_H1.279 Fab-Fc Heavy Chain

SEQ ID NO: 29734 - protein, 480 aa, synthetic construct; identical to SEQ ID NO: 2870
  REGION 1..480: note = Description of Artificial Sequence: Synthetic polypeptide
  REGION 1..480: note = XENP022746 [ICOS]_H0_L0.36_Fab-1G6_L1.194_H1.279 scFv-Fc Heavy Chain

SEQ ID NO: 29735 - protein, 214 aa, synthetic construct; identical to SEQ ID NO: 26517
  REGION 1..214: note = Description of Artificial Sequence: Synthetic polypeptide
  REGION 1..214: note = XENP022746 [ICOS]_H0_L0.36_Fab-1G6_L1.194_H1.279 Light Chain

SEQ ID NO: 29736 - protein, 454 aa, synthetic construct; identical to SEQ ID NO: 26442
  REGION 1..454: note = Description of Artificial Sequence: Synthetic polypeptide
  REGION 1..454: note = XENP022747 [ICOS]_H0_L0.37_Fab-1G6_L1.194_H1.279 Fab-Fc Heavy Chain

SEQ ID NO: 29737 - protein, 480 aa, synthetic construct; identical to SEQ ID NO: 2870
  REGION 1..480: note = Description of Artificial Sequence: Synthetic polypeptide
  REGION 1..480: note = XENP022747 [ICOS]_H0_L0.37_Fab-1G6_L1.194_H1.279 scFv-Fc Heavy Chain

SEQ ID NO: 29738 - protein, 214 aa, synthetic construct; identical to SEQ ID NO: 26537
  REGION 1..214: note = Description of Artificial Sequence: Synthetic polypeptide
  REGION 1..214: note = XENP022747 [ICOS]_H0_L0.37_Fab-1G6_L1.194_H1.279 Light Chain

SEQ ID NO: 29739 - protein, 454 aa, synthetic construct; identical to SEQ ID NO: 26442
  REGION 1..454: note = Description of Artificial Sequence: Synthetic polypeptide
  REGION 1..454: note = XENP022748 [ICOS]_H0_L0.38_Fab-1G6_L1.194_H1.279 Fab-Fc Heavy Chain

SEQ ID NO: 29740 - protein, 480 aa, synthetic construct; identical to SEQ ID NO: 2870
  REGION 1..480: note = Description of Artificial Sequence: Synthetic polypeptide
  REGION 1..480: note = XENP022748 [ICOS]_H0_L0.38_Fab-1G6_L1.194_H1.279 scFv-Fc Heavy Chain

SEQ ID NO: 29741 - protein, 214 aa, synthetic construct; identical to SEQ ID NO: 26557
  REGION 1..214: note = Description of Artificial Sequence: Synthetic polypeptide
  REGION 1..214: note = XENP022748 [ICOS]_H0_L0.38_Fab-1G6_L1.194_H1.279 Light Chain

SEQ ID NO: 29742 - protein, 454 aa, synthetic construct; identical to SEQ ID NO: 26562
  REGION 1..454: note = Description of Artificial Sequence: Synthetic polypeptide
  REGION 1..454: note = XENP023092 [ICOS]_H0.66_L0_Fab-1G6_L1.194_H1.279 Fab-Fc Heavy Chain

SEQ ID NO: 29743 - protein, 480 aa, synthetic construct; identical to SEQ ID NO: 2870
  REGION 1..480: note = Description of Artificial Sequence: Synthetic polypeptide
  REGION 1..480: note = XENP023092 [ICOS]_H0.66_L0_Fab-1G6_L1.194_H1.279 scFv-Fc Heavy Chain

SEQ ID NO: 29744 - protein, 214 aa, synthetic construct; identical to SEQ ID NO: 26297
  REGION 1..214: note = Description of Artificial Sequence: Synthetic polypeptide
  REGION 1..214: note = XENP023092 [ICOS]_H0.66_L0_Fab-1G6_L1.194_H1.279 Light Chain

SEQ ID NO: 29745 - protein, 454 aa, synthetic construct; identical to SEQ ID NO: 26562
  REGION 1..454: note = Description of Artificial Sequence: Synthetic polypeptide
  REGION 1..454: note = XENP023410 [ICOS]_H0.66_L0.34_Fab-1G6_L1.194_H1.279 Fab-Fc Heavy Chain

SEQ ID NO: 29746 - protein, 480 aa, synthetic construct; identical to SEQ ID NO: 2870
  REGION 1..480: note = Description of Artificial Sequence: Synthetic polypeptide
  REGION 1..480: note = XENP023410 [ICOS]_H0.66_L0.34_Fab-1G6_L1.194_H1.279 scFv-Fc Heavy Chain

SEQ ID NO: 29747 - protein, 214 aa, synthetic construct; identical to SEQ ID NO: 26497
  REGION 1..214: note = Description of Artificial Sequence: Synthetic polypeptide
  REGION 1..214: note = XENP023410 [ICOS]_H0.66_L0.34_Fab-1G6_L1.194_H1.279 Light Chain

SEQ ID NO: 29748 - protein, 454 aa, synthetic construct; identical to SEQ ID NO: 26362
  REGION 1..454: note = Description of Artificial Sequence: Synthetic polypeptide
  REGION 1..454: note = XENP022730 [ICOS]_H0L0_Fab-1G6_L1.194_H1.279 Fab-Fc Heavy Chain

SEQ ID NO: 29749 - protein, 480 aa, synthetic construct; identical to SEQ ID NO: 2930
  REGION 1..480: note = Description of Artificial Sequence: Synthetic polypeptide
  REGION 1..480: note = XENP022730 [ICOS]_H0L0_Fab-1G6_L1.194_H1.279 scFv-Fc Heavy Chain

SEQ ID NO: 29750 - protein, 214 aa, synthetic construct; identical to SEQ ID NO: 26297
  REGION 1..214: note = Description of Artificial Sequence: Synthetic polypeptide
  REGION 1..214: note = XENP022730 [ICOS]_H0L0_Fab-1G6_L1.194_H1.279 Light Chain

SEQ ID NO: 29751 - protein, 454 aa, synthetic construct; identical to SEQ ID NO: 26362
  REGION 1..454: note = Description of Artificial Sequence: Synthetic polypeptide
  REGION 1..454: note = XENP022974 [ICOS]_H0_L0.34_Fab-1G6_L1.194_H1.279 Fab-Fc Heavy Chain

SEQ ID NO: 29752 - protein, 480 aa, synthetic construct; identical to SEQ ID NO: 2930
  REGION 1..480: note = Description of Artificial Sequence: Synthetic polypeptide
  REGION 1..480: note = XENP022974 [ICOS]_H0_L0.34_Fab-1G6_L1.194_H1.279 scFv-Fc Heavy Chain

SEQ ID NO: 29753 - protein, 214 aa, synthetic construct; identical to SEQ ID NO: 26497
  REGION 1..214: note = Description of Artificial Sequence: Synthetic polypeptide
  REGION 1..214: note = XENP022974 [ICOS]_H0_L0.34_Fab-1G6_L1.194_H1.279 Light Chain

SEQ ID NO: 29754 - protein, 454 aa, synthetic construct; identical to SEQ ID NO: 26642
  REGION 1..454: note = Description of Artificial Sequence: Synthetic polypeptide
  REGION 1..454: note = XENP023104 [ICOS]_H0.66_L0_Fab-1G6_L1.194_H1.279 Fab-Fc Heavy Chain

SEQ ID NO: 29755 - protein, 480 aa, synthetic construct; identical to SEQ ID NO: 2930
  REGION 1..480: note = Description of Artificial Sequence: Synthetic polypeptide
  REGION 1..480: note = XENP023104 [ICOS]_H0.66_L0_Fab-1G6_L1.194_H1.279 scFv-Fc Heavy Chain

SEQ ID NO: 29756 - protein, 214 aa, synthetic construct; identical to SEQ ID NO: 26297
  REGION 1..214: note = Description of Artificial Sequence: Synthetic polypeptide
  REGION 1..214: note = XENP023104 [ICOS]_H0.66_L0_Fab-1G6_L1.194_H1.279 Light Chain

SEQ ID NO: 29757 - protein, 454 aa, synthetic construct; identical to SEQ ID NO: 26642
  REGION 1..454: note = Description of Artificial Sequence: Synthetic polypeptide
  REGION 1..454: note = XENP023411 [ICOS]_H0.66_L0.34_Fab-1G6_L1.194_H1.279 Fab-Fc Heavy Chain

SEQ ID NO: 29758 - protein, 480 aa, synthetic construct; identical to SEQ ID NO: 2930
  REGION 1..480: note = Description of Artificial Sequence: Synthetic polypeptide
  REGION 1..480: note = XENP023411 [ICOS]_H0.66_L0.34_Fab-1G6_L1.194_H1.279 scFv-Fc Heavy Chain

SEQ ID NO: 29759 - protein, 214 aa, synthetic construct; identical to SEQ ID NO: 26497
  REGION 1..214: note = Description of Artificial Sequence: Synthetic polypeptide
  REGION 1..214: note = XENP023411 [ICOS]_H0.66_L0.34_Fab-1G6_L1.194_H1.279 Light Chain

SEQ ID NO: 29760 - protein, 452 aa, synthetic construct; identical to SEQ ID NO: 26682
  REGION 1..452: note = Description of Artificial Sequence: Synthetic polypeptide
  REGION 1..452: note = XENP021828 GSK_314.8[ICOS]_H0L0_Fab-1G6_L1.194_H1.279_scFv Fab-Fc Heavy Chain

SEQ ID NO: 29761 - protein, 480 aa, synthetic construct; identical to SEQ ID NO: 2870
  REGION 1..480: note = Description of Artificial Sequence: Synthetic polypeptide
  REGION 1..480: note = XENP021828 GSK_314.8[ICOS]_H0L0_Fab-1G6_L1.194_H1.279_scFv scFv -Fc Heavy Chain

SEQ ID NO: 29762 - protein, 219 aa, synthetic construct; identical to SEQ ID NO: 26307
  REGION 1..219: note = Description of Artificial Sequence: Synthetic polypeptide
  REGION 1..219: note = XENP021828 GSK_314.8[ICOS]_H0L0_Fab-1G6_L1.194_H1.279_scFv Light Chain

SEQ ID NO: 29763 - protein, 453 aa, synthetic construct; identical to SEQ ID NO: 26702
  REGION 1..453: note = Description of Artificial Sequence: Synthetic polypeptide
  REGION 1..453: note = XENP021829 GSK_88.2[ICOS]_H0L0_Fab-1G6_L1.194_H1.279_scFv Fab-Fc Heavy Chain

SEQ ID NO: 29764 - protein, 480 aa, synthetic construct; identical to SEQ ID NO: 2870
  REGION 1..480: note = Description of Artificial Sequence: Synthetic polypeptide
  REGION 1..480: note = XENP021829 GSK_88.2[ICOS]_H0L0_Fab-1G6_L1.194_H1.279_scFv scFv-Fc Heavy Chain

SEQ ID NO: 29765 - protein, 219 aa, synthetic construct; identical to SEQ ID NO: 26317
  REGION 1..219: note = Description of Artificial Sequence: Synthetic polypeptide
  REGION 1..219: note = XENP021829 GSK_88.2[ICOS]_H0L0_Fab-1G6_L1.194_H1.279_scFv Light Chain

SEQ ID NO: 29766 - protein, 454 aa, synthetic construct; identical to SEQ ID NO: 26722
  REGION 1..454: note = Description of Artificial Sequence: Synthetic polypeptide
  REGION 1..454: note = XENP021830 jMab-138[ICOS]_H0L0_Fab-1G6_L1.194_H1.279_scFv Fab-Fc Heavy Chain

SEQ ID NO: 29767 - protein, 480 aa, synthetic construct; identical to SEQ ID NO: 2870
  REGION 1..480: note = Description of Artificial Sequence: Synthetic polypeptide
  REGION 1..480: note = XENP021830 jMab-138[ICOS]_H0L0_Fab-1G6_L1.194_H1.279_scFv scFv-Fc Heavy Chain

SEQ ID NO: 29768 - protein, 216 aa, synthetic construct; identical to SEQ ID NO: 26327
  REGION 1..216: note = Description of Artificial Sequence: Synthetic polypeptide
  REGION 1..216: note = XENP021830 jMab-138[ICOS]_H0L0_Fab-1G6_L1.194_H1.279_scFv Light Chain

SEQ ID NO: 29769 - protein, 454 aa, synthetic construct; identical to SEQ ID NO: 26742
  REGION 1..454: note = Description of Artificial Sequence: Synthetic polypeptide
  REGION 1..454: note = XENP021831 jMab-139[ICOS]_H0L0_Fab-1G6_L1.194_H1.279_scFv Fab-Fc Heavy Chain

SEQ ID NO: 29770 - protein, 480 aa, synthetic construct; identical to SEQ ID NO: 2870
  REGION 1..480: note = Description of Artificial Sequence: Synthetic polypeptide
  REGION 1..480: note = XENP021831 jMab-139[ICOS]_H0L0_Fab-1G6_L1.194_H1.279_scFv scFv-Fc Heavy Chain

SEQ ID NO: 29771 - protein, 216 aa, synthetic construct; identical to SEQ ID NO: 26337
  REGION 1..216: note = Description of Artificial Sequence: Synthetic polypeptide
  REGION 1..216: note = XENP021831 jMab-139[ICOS]_H0L0_Fab-1G6_L1.194_H1.279_scFv Light Chain

SEQ ID NO: 29772 - protein, 450 aa, synthetic construct; identical to SEQ ID NO: 26762
  REGION 1..450: note = Description of Artificial Sequence: Synthetic polypeptide
  REGION 1..450: note = XENP022348 WO2016059602_GSK_H0L0_Fab-1G6_L1.194_H1.279_scFv Fab -Fc Heavy Chain

SEQ ID NO: 29773 - protein, 480 aa, synthetic construct; identical to SEQ ID NO: 2870
  REGION 1..480: note = Description of Artificial Sequence: Synthetic polypeptide
  REGION 1..480: note = XENP022348 WO2016059602_GSK_H0L0_Fab-1G6_L1.194_H1.279_scFv scFv -Fc Heavy Chain

SEQ ID NO: 29774 - protein, 213 aa, synthetic construct; identical to SEQ ID NO: 26347
  REGION 1..213: note = Description of Artificial Sequence: Synthetic polypeptide
  REGION 1..213: note = XENP022348 WO2016059602_GSK_H0L0_Fab-1G6_L1.194_H1.279_scFv Light Chain

SEQ ID NO: 29775 - protein, 446 aa, synthetic construct; identical to SEQ ID NO: 26782
  REGION 1..446: note = Description of Artificial Sequence: Synthetic polypeptide
  REGION 1..446: note = XENP023059 Jounce_37A10S713[ICOS]_H0L0_Fab-1G6_[PD-1]_L1.194_H1 .279_scFv Fab-Fc Heavy Chain

SEQ ID NO: 29776 - protein, 480 aa, synthetic construct; identical to SEQ ID NO: 2870
  REGION 1..480: note = Description of Artificial Sequence: Synthetic polypeptide
  REGION 1..480: note = XENP023059 Jounce_37A10S713[ICOS]_H0L0_Fab-1G6_[PD-1]_L1.194_H1 .279_scFv scFv-Fc Heavy Chain

SEQ ID NO: 29777 - protein, 218 aa, synthetic construct; identical to SEQ ID NO: 26357
  REGION 1..218: note = Description of Artificial Sequence: Synthetic polypeptide
  REGION 1..218: note = XENP023059 Jounce_37A10S713[ICOS]_H0L0_Fab-1G6_[PD-1]_L1.194_H1 .279_scFv Light Chain

SEQ ID NO: 29778 - protein, 329 aa, synthetic construct; identical to SEQ ID NO: 28669
  REGION 1..329: note = Description of Artificial Sequence: Synthetic polypeptide
  REGION 1..329: note = Fab-Fc Heavy Chain

SEQ ID NO: 29779 - protein, 113 aa, synthetic construct; identical to SEQ ID NO: 26849
  REGION 1..113: note = Description of Artificial Sequence: Synthetic polypeptide
  REGION 1..113: note = Fab-scFv-Fc Heavy Chain

SEQ ID NO: 29780 - protein, 235 aa, synthetic construct
  REGION 1..235: note = Description of Artificial Sequence: Synthetic polypeptide
  REGION 1..235: note = Fab-scFv-Fc Heavy Chain
GGGGSGGGGSKTHTCPPCPAPPVAGPSVFLFPPKPKDTLMISRTPEVTCVVVDVKHEDPEVKFNWYVDGVEVHNAKTKPREEQYNSTYRVVSVLTVLHQDWLNGKEYKCKVSNKALPAPIEKTISKAKGQPREPQVYTLPPSREQMTKNQVKLTCLVKGFYPSDIAVEWESNGQPENNYKTTPPVLDSDGSFFLYSKLTVDKSRWQQGNVFSCSVMHEALHNHYTQKSLSLSPGK

SEQ ID NO: 29781 - protein, 107 aa, synthetic construct [sequence omitted]

SEQ ID NO: 29782 - protein, 113 aa, synthetic construct; identical to SEQ ID NO: 26907
  REGION 1..113: note = Description of Artificial Sequence: Synthetic polypeptide
  REGION 1..113: note = Heavy Chain

SEQ ID NO: 29783 - protein, 235 aa, synthetic construct
  REGION 1..235: note = Description of Artificial Sequence: Synthetic polypeptide
  REGION 1..235: note = Heavy Chain
GGGGSGGGGSKTHTCPPCPAPPVAGPSVFLFPPKPKDTLMISRTPEVTCVVVDVKHEDPEVKFNWYVDGVEVHNAKTKPREEQYNSTYRVVSVLTVLHQDWLNGKEYKCKVSNKALPAPIEKTISKAKGQPREPQVYTLPPSREEMTKNQVSLTCLVKGFYPSDIAVEWESNGQPENNYKTTPPVLDSDGSFFLYSKLTVDKSRWQQGNVFSCSVMHEALHNHYTQKSLSLSPGK

SEQ ID NO: 29784 - protein, 107 aa, synthetic construct [sequence omitted]

SEQ ID NO: 29785 - protein, 329 aa, synthetic construct; identical to SEQ ID NO: 28669
  REGION 1..329: note = Description of Artificial Sequence: Synthetic polypeptide
  REGION 1..329: note = Heavy Chain 1

SEQ ID NO: 29786 - protein, 329 aa, synthetic construct
  REGION 1..329: note = Description of Artificial Sequence: Synthetic polypeptide
  REGION 1..329: note = Heavy Chain 2
ASTKGPSVFPLAPSSKSTSGGTAALGCLVKDYFPEPVTVSWNSGALTSGVHTFPAVLQSSGLYSLSSVVTVPSSSLGTKTYTCNVNHKPSNTKVDKKVERKSCDKTHTCPRCPAPPVAGPSVFLFPPKPKDTLMISRTPEVTCVVVDVKHEDPEVKFKWYVDGVEVHNAKTKPREEQYNSTYRVVSVLTVLHQDWLNGKEYKCKVSNKALPAPIEKTISKAKGQPREPQVYTLPPSREQMTKNQVKLTCLVKGFYPSDIAVEWESNGQPENNYKTTPPVLDSDGSFFLYSKLTVDKSRWQQGNVFSCSVMHEALHNHYTQKSLSLSPGK

SEQ ID NO: 29787 - protein, 107 aa, synthetic construct [sequence omitted]

SEQ ID NO: 29788 - protein, 107 aa, synthetic construct [sequence omitted]

SEQ ID NO: 29789 - protein, 342 aa, synthetic construct
  REGION 1..342: note = Description of Artificial Sequence: Synthetic polypeptide
  REGION 1..342: note = Heavy Chain
ASTKGPSVFPLAPASTKGPSVFPLAPSSKSTSGGTAALGCLVKDYFPEPVTVSWNSGALTSGVHTFPAVLQSSGLYSLSSVVTVPSSSLGTQTYICNVNHKPSNTKVDKKVEPKSCDKTHTCPPCPAPPVAGPSVFLFPPKPKDTLMISRTPEVTCVVVDVKHEDPEVKFNWYVDGVEVHNAKTKPREEQYNSTYRVVSVLTVLHQDWLNGKEYKCKVSNKALPAPIEKTISKAKGQPREPQVYTLPPSREEMTKNQVSLTCLVKGFYPSDIAVEWESNGQPENNYKTTPPVLDSDGSFFLYSKLTVDKSRWQQGNVFSCSVMHEALHNHYTQKSLSLSPGK

SEQ ID NO: 29790 - protein, 120 aa, synthetic construct
  REGION 1..120: note = Description of Artificial Sequence: Synthetic polypeptide
  REGION 1..120: note = Light Chain
RTVAAPSVFIFPPRTVAAPSVFIFPPSDEQLKSGTASVVCLLNNFYPREAKVQWKVDNALQSGNSQESVTEQDSKDSTYSLSSTLTLSKADYEKHKVYACEVTHQGLSSPVTKSFNRGEC

SEQ ID NO: 29791 - protein, 273 aa, synthetic construct
  REGION 1..273: note = Description of Artificial Sequence: Synthetic polypeptide
  REGION 1..273: note = Heavy Chain 1
GGGSGGGGGGCGGGEVAACEKEVAALEKEVAALEKEVAALEKEPKSSDKTHTCPPCPAPPVAGPSVFLFPPKPKDTLMISRTPEVTCVVVDVKHEDPEVKFNWYVDGVEVHNAKTKPREEEYNSTYRVVSVLTVLHQDWLNGKEYKCKVSNKALPAPIEKTISKAKGQPREPQVYTLPPSREEMTKNQVSLTCDVSGFYPSDIAVEWESDGQPENNYKTTPPVLDSDGSFFLYSKLTVDKSRWEQGDVFSCSVMHEALHNHYTQKSLSLSPGK

SEQ ID NO: 29792 - protein, 329 aa, synthetic construct; identical to SEQ ID NO: 29786
  REGION 1..329: note = Description of Artificial Sequence: Synthetic polypeptide
  REGION 1..329: note = Heavy Chain 2

SEQ ID NO: 29793 - protein, 42 aa, synthetic construct
  REGION 1..42: note = Description of Artificial Sequence: Synthetic polypeptide
  REGION 1..42: note = Light Chain 1
GGGSGGGGGGCGGGKVAACKEKVAALKEKVAALKEKVAALKE

SEQ ID NO: 29794 - protein, 107 aa, synthetic construct [sequence omitted]

SEQ ID NO: 29795 - protein, 442 aa, synthetic construct; identical to SEQ ID NO: 26802
  REGION 1..442: note = Description of Artificial Sequence: Synthetic polypeptide
  REGION 1..442: note = XENP018920 nivolumab[PD-1]_H0L0_Fab-[anti-ICOS]_H0L0_scFv Fab-Fc Heavy Chain

SEQ ID NO: 29796 - protein, 471 aa, synthetic construct; identical to SEQ ID NO: 26807
  REGION 1..471: note = Description of Artificial Sequence: Synthetic polypeptide
  REGION 1..471: note = XENP018920 nivolumab[PD-1]_H0L0_Fab-[anti-ICOS]_H0L0_scFv scFv -Fc Heavy Chain

SEQ ID NO: 29797 - protein, 214 aa, synthetic construct; identical to SEQ ID NO: 16146
  REGION 1..214: note = Description of Artificial Sequence: Synthetic polypeptide
  REGION 1..214: note = XENP018920 nivolumab[PD-1]_H0L0_Fab-[anti-ICOS]_H0L0_scFv Light Chain

SEQ ID NO: 29798 - protein, 456 aa, synthetic construct; identical to SEQ ID NO: 26822
  REGION 1..456: note = Description of Artificial Sequence: Synthetic polypeptide
  REGION 1..456: note = XENP024130 LOPD180[PD-1]_H1L1_Fab-[anti-ICOS]_H0L0_scFv Fab-Fc Heavy Chain

SEQ ID NO: 29799 - protein, 483 aa, synthetic construct; identical to SEQ ID NO: 26827
  REGION 1..483: note = Description of Artificial Sequence: Synthetic polypeptide
  REGION 1..483: note = XENP024130 LOPD180[PD-1]_H1L1_Fab-[anti-ICOS]_H0L0_scFv scFv-Fc Heavy Chain

SEQ ID NO: 29800 - protein, 216 aa, synthetic construct; identical to SEQ ID NO: 26837
  REGION 1..216: note = Description of Artificial Sequence: Synthetic polypeptide
  REGION 1..216: note = XENP024130 LOPD180[PD-1]_H1L1_Fab-[anti-ICOS]_H0L0_scFv Light Chain

SEQ ID NO: 29801 - protein, 454 aa, synthetic construct; identical to SEQ ID NO: 26442
  REGION 1..454: note = Description of Artificial Sequence: Synthetic polypeptide
  REGION 1..454: note = XENP023406 [anti-ICOS]_H0L0_Fab-[anti-ICOS]_H0L0_Fab_1G6_L1.194 _H1.279_scFv Fab-Fc Heavy Chain

SEQ ID NO: 29802 - protein, 722 aa, synthetic construct; identical to SEQ ID NO: 26847
  REGION 1..722: note = Description of Artificial Sequence: Synthetic polypeptide
  REGION 1..722: note = XENP023406 [anti-ICOS]_H0L0_Fab-[anti-ICOS]_H0L0_Fab_1G6_L1.194 _H1.279_scFv Fab-scFv-Fc Heavy Chain

SEQ ID NO: 29803 - protein, 214 aa, synthetic construct; identical to SEQ ID NO: 26297
  REGION 1..214: note = Description of Artificial Sequence: Synthetic polypeptide
  REGION 1..214: note = XENP023406 [anti-ICOS]_H0L0_Fab-[anti-ICOS]_H0L0_Fab_1G6_L1.194 _H1.279_scFv Light Chain

SEQ ID NO: 29804 - protein, 455 aa, synthetic construct; identical to SEQ ID NO: 26863
  REGION 1..455: note = Description of Artificial Sequence: Synthetic polypeptide
  REGION 1..455: note = XENP023407 [anti-ICOS]_H0L0_Fab-[anti-ICOS]_H0L0_Fab_1G6_L1.194 _H1.279_scFv Fab-Fc Heavy Chain

SEQ ID NO: 29805 - protein, 723 aa, synthetic construct; identical to SEQ ID NO: 26868
  REGION 1..723: note = Description of Artificial Sequence: Synthetic polypeptide
  REGION 1..723: note = XENP023407 [anti-ICOS]_H0L0_Fab-[anti-ICOS]_H0L0_Fab_1G6_L1.194 _H1.279_scFv Fab-scFv-Fc Heavy Chain

SEQ ID NO: 29806 - protein, 214 aa, synthetic construct; identical to SEQ ID NO: 26297
  REGION 1..214: note = Description of Artificial Sequence: Synthetic polypeptide
  REGION 1..214: note = XENP023407 [anti-ICOS]_H0L0_Fab-[anti-ICOS]_H0L0_Fab_1G6_L1.194 _H1.279_scFv Light Chain

SEQ ID NO: 29807 - protein, 451 aa, synthetic construct; identical to SEQ ID NO: 26884
  REGION 1..451: note = Description of Artificial Sequence: Synthetic polypeptide
  REGION 1..451: note = XENP024128 1G6_L1.194_H1.279_Fab-1G6_L1.194_H1.279_Fab_[anti-ICOS] _H0L0_scFv Fab-Fc Heavy Chain

SEQ ID NO: 29808 - protein, 722 aa, synthetic construct; identical to SEQ ID NO: 26889
  REGION 1..722: note = Description of Artificial Sequence: Synthetic polypeptide
  REGION 1..722: note = XENP024128 1G6_L1.194_H1.279_Fab-1G6_L1.194_H1.279_Fab_[anti-ICOS] _H0L0_scFv Fab-scFv-Fc Heavy Chain

SEQ ID NO: 29809 - protein, 214 aa, synthetic construct; identical to SEQ ID NO: 21486
  REGION 1..214: note = Description of Artificial Sequence: Synthetic polypeptide
  REGION 1..214: note = XENP024128 1G6_L1.194_H1.279_Fab-1G6_L1.194_H1.279_Fab_[anti-ICOS] _H0L0_scFv Light Chain

SEQ ID NO: 29810 - protein, 722 aa, synthetic construct; identical to SEQ ID NO: 26905
  REGION 1..722: note = Description of Artificial Sequence: Synthetic polypeptide
  REGION 1..722: note = XENP024123 1G6_H1.279_L1.194_Fab_(G4S)2_[anti-ICOS]_H0L0_scFv20_Fc _IgG1 Heavy Chain

SEQ ID NO: 29811 - protein, 214 aa, synthetic construct; identical to SEQ ID NO: 21486
  REGION 1..214: note = Description of Artificial Sequence: Synthetic polypeptide
  REGION 1..214: note = XENP024123 1G6_H1.279_L1.194_Fab_(G4S)2_[anti-ICOS]_H0L0_scFv20_Fc _IgG1 Light Chain

SEQ ID NO: 29812 - protein, 727 aa, synthetic construct; identical to SEQ ID NO: 26921
  REGION 1..727: note = Description of Artificial Sequence: Synthetic polypeptide
  REGION 1..727: note = XENP024125 LOPD180[PD-1]_H1L1_Fab_(G4S)2_[anti-ICOS]_H0L0_scFv20 _Fc_IgG1 Heavy Chain

SEQ ID NO: 29813 - protein, 216 aa, synthetic construct; identical to SEQ ID NO: 26837
  REGION 1..216: note = Description of Artificial Sequence: Synthetic polypeptide
  REGION 1..216: note = XENP024125 LOPD180[PD-1]_H1L1_Fab_(G4S)2_[anti-ICOS]_H0L0_scFv20 _Fc_IgG1 Light Chain

SEQ ID NO: 29814 - protein, 451 aa, synthetic construct; identical to SEQ ID NO: 26884
  REGION 1..451: note = Description of Artificial Sequence: Synthetic polypeptide
  REGION 1..451: note = XENP024134 1G6_H1.279_L1.194_Fab-[anti-ICOS]_H0L0_Fab-IgG1 Heavy Chain 1

SEQ ID NO: 29815 - protein, 454 aa, synthetic construct; identical to SEQ ID NO: 26942
  REGION 1..454: note = Description of Artificial Sequence: Synthetic polypeptide
  REGION 1..454: note = XENP024134 1G6_H1.279_L1.194_Fab-[anti-ICOS]_H0L0_Fab-IgG1 Heavy Chain 2

SEQ ID NO: 29816 - protein, 214 aa, synthetic construct; identical to SEQ ID NO: 21486
  REGION 1..214: note = Description of Artificial Sequence: Synthetic polypeptide
  REGION 1..214: note = XENP024134 1G6_H1.279_L1.194_Fab-[anti-ICOS]_H0L0_Fab-IgG1 Light Chain 1

SEQ ID NO: 29817 - protein, 214 aa, synthetic construct; identical to SEQ ID NO: 26297
  REGION 1..214: note = Description of Artificial Sequence: Synthetic polypeptide
  REGION 1..214: note = XENP024134 1G6_H1.279_L1.194_Fab-[anti-ICOS]_H0L0_Fab-IgG1 Light Chain 2

SEQ ID NO: 29818 - protein, 589 aa, synthetic construct; identical to SEQ ID NO: 26957
  REGION 1..589: note = Description of Artificial Sequence: Synthetic polypeptide
  REGION 1..589: note = XENP024122 1G6_H1.279_L1.194_[anti-ICOS]_H0L0_IgG1 Heavy Chain

SEQ ID NO: 29819 - protein, 334 aa, synthetic construct; identical to SEQ ID NO: 26967
  REGION 1..334: note = Description of Artificial Sequence: Synthetic polypeptide
  REGION 1..334: note = XENP024122 1G6_H1.279_L1.194_[anti-ICOS]_H0L0_IgG1 Light Chain

SEQ ID NO: 29820 - protein, 502 aa, synthetic construct; identical to SEQ ID NO: 26977
  REGION 1..502: note = Description of Artificial Sequence: Synthetic polypeptide
  REGION 1..502: note = XENP024132 1G6_L1.194_1G6_H1.279_DART-[anti-ICOS]_H0L0_Fab-Fc_IgG1 Heavy Chain 1

SEQ ID NO: 29821 - protein, 454 aa, synthetic construct; identical to SEQ ID NO: 26942
  REGION 1..454: note = Description of Artificial Sequence: Synthetic polypeptide
  REGION 1..454: note = XENP024132 1G6_L1.194_1G6_H1.279_DART-[anti-ICOS]_H0L0_Fab-Fc_IgG1 Heavy Chain 2

SEQ ID NO: 29822 - protein, 281 aa, synthetic construct; identical to SEQ ID NO: 26992
  REGION 1..281: note = Description of Artificial Sequence: Synthetic polypeptide
  REGION 1..281: note = XENP024132 1G6_L1.194_1G6_H1.279_DART-[anti-ICOS]_H0L0_Fab-Fc_IgG1 Light Chain 1

SEQ ID NO: 29823 - protein, 214 aa, synthetic construct; identical to SEQ ID NO: 26297
  REGION 1..214: note = Description of Artificial Sequence: Synthetic polypeptide
  REGION 1..214: note = XENP024132 1G6_L1.194_1G6_H1.279_DART-[anti-ICOS]_H0L0_Fab-Fc_IgG1 Light Chain 2

SEQ ID NO: 29824 - protein, 503 aa, synthetic construct; identical to SEQ ID NO: 27007
  REGION 1..503: note = Description of Artificial Sequence: Synthetic polypeptide
  REGION 1..503: note = XENP024133 mAb7(1.2)[PD-1]_L1_mAb7(1.2)[PD-1]_H1_DART-[anti-ICOS] _H0L0_Fab-Fc_IgG1 Heavy Chain 1

SEQ ID NO: 29825 - protein, 454 aa, synthetic construct; identical to SEQ ID NO: 26942
  REGION 1..454: note = Description of Artificial Sequence: Synthetic polypeptide
  REGION 1..454: note = XENP024133 mAb7(1.2)[PD-1]_L1_mAb7(1.2)[PD-1]_H1_DART-[anti-ICOS] _H0L0_Fab-Fc_IgG1 Heavy Chain 2

SEQ ID NO: 29826 - protein, 282 aa, synthetic construct; identical to SEQ ID NO: 27022
  REGION 1..282: note = Description of Artificial Sequence: Synthetic polypeptide
  REGION 1..282: note = XENP024133 mAb7(1.2)[PD-1]_L1_mAb7(1.2)[PD-1]_H1_DART-[anti-ICOS] _H0L0_Fab-Fc_IgG1 Light Chain 1

SEQ ID NO: 29827 - protein, 214 aa, synthetic construct; identical to SEQ ID NO: 26297
  REGION 1..214: note = Description of Artificial Sequence: Synthetic polypeptide
  REGION 1..214: note = XENP024133 mAb7(1.2)[PD-1]_L1_mAb7(1.2)[PD-1]_H1_DART-[anti-ICOS] _H0L0_Fab-Fc_IgG1 Light Chain 2

SEQ ID NO: 29828 - protein, 454 aa, synthetic construct; identical to SEQ ID NO: 26442
  REGION 1..454: note = Description of Artificial Sequence: Synthetic polypeptide
  REGION 1..454: note = XENP021749 [anti-ICOS]_H0L0_Fab-[anti-CTLA-4]_H3.23_L0.129_scFv Fab-Fc Heavy Chain

SEQ ID NO: 29829 - protein, 477 aa, synthetic construct; identical to SEQ ID NO: 2394
  REGION 1..477: note = Description of Artificial Sequence: Synthetic polypeptide
  REGION 1..477: note = XENP021749 [anti-ICOS]_H0L0_Fab-[anti-CTLA-4]_H3.23_L0.129_scFv scFv-Fc Heavy Chain

SEQ ID NO: 29830 - protein, 214 aa, synthetic construct; identical to SEQ ID NO: 26297
  REGION 1..214: note = Description of Artificial Sequence: Synthetic polypeptide
  REGION 1..214: note = XENP021749 [anti-ICOS]_H0L0_Fab-[anti-CTLA-4]_H3.23_L0.129_scFv Light Chain

SEQ ID NO: 29831 - protein, 450 aa, synthetic construct; identical to SEQ ID NO: 2785
  REGION 1..450: note = Description of Artificial Sequence: Synthetic polypeptide
  REGION 1..450: note = XENP024359 7G8_H3.30_L1.34_Fab-[anti-ICOS]_H0L0_Fab Heavy Chain 1

SEQ ID NO: 29832 - protein, 454 aa, synthetic construct; identical to SEQ ID NO: 26942
  REGION 1..454: note = Description of Artificial Sequence: Synthetic polypeptide
  REGION 1..454: note = XENP024359 7G8_H3.30_L1.34_Fab-[anti-ICOS]_H0L0_Fab Heavy Chain 2

SEQ ID NO: 29833 - protein, 218 aa, synthetic construct; identical to SEQ ID NO: 2420
  REGION 1..218: note = Description of Artificial Sequence: Synthetic polypeptide
  REGION 1..218: note = XENP024359 7G8_H3.30_L1.34_Fab-[anti-ICOS]_H0L0_Fab Light Chain 1

SEQ ID NO: 29834 - protein, 214 aa, synthetic construct; identical to SEQ ID NO: 26297
  REGION 1..214: note = Description of Artificial Sequence: Synthetic polypeptide
  REGION 1..214: note = XENP024359 7G8_H3.30_L1.34_Fab-[anti-ICOS]_H0L0_Fab Light Chain 2

SEQ ID NO: 29835 - protein, 447 aa, synthetic construct; identical to SEQ ID NO: 2865
  REGION 1..447: note = Description of Artificial Sequence: Synthetic polypeptide
  REGION 1..447: note = XENP024360 2A11_H1.144_L2.142_Fab-[anti-ICOS]_H0L0_Fab Heavy Chain 1

SEQ ID NO: 29836 - protein, 454 aa, synthetic construct; identical to SEQ ID NO: 26942
  REGION 1..454: note = Description of Artificial Sequence: Synthetic polypeptide
  REGION 1..454: note = XENP024360 2A11_H1.144_L2.142_Fab-[anti-ICOS]_H0L0_Fab Heavy Chain 2

SEQ ID NO: 29837 - protein, 214 aa, synthetic construct; identical to SEQ ID NO: 2660
  REGION 1..214: note = Description of Artificial Sequence: Synthetic polypeptide
  REGION 1..214: note = XENP024360 2A11_H1.144_L2.142_Fab-[anti-ICOS]_H0L0_Fab Light Chain 1

SEQ ID NO: 29838 - protein, 214 aa, synthetic construct; identical to SEQ ID NO: 26297
  REGION 1..214: note = Description of Artificial Sequence: Synthetic polypeptide
  REGION 1..214: note = XENP024360 2A11_H1.144_L2.142_Fab-[anti-ICOS]_H0L0_Fab Light Chain 2

SEQ ID NO: 29839 - protein, 446 aa, synthetic construct; identical to SEQ ID NO: 27097
  REGION 1..446: note = Description of Artificial Sequence: Synthetic polypeptide
  REGION 1..446: note = XENP024361 3H3_H1_L2.1_Fab-[anti-ICOS]_H0L0_Fab Heavy Chain 1

SEQ ID NO: 29840 - protein, 454 aa, synthetic construct; identical to SEQ ID NO: 26942
  REGION 1..454: note = Description of Artificial Sequence: Synthetic polypeptide
  REGION 1..454: note = XENP024361 3H3_H1_L2.1_Fab-[anti-ICOS]_H0L0_Fab Heavy Chain 2

SEQ ID NO: 29841 - protein, 219 aa, synthetic construct; identical to SEQ ID NO: 3510
  REGION 1..219: note = Description of Artificial Sequence: Synthetic polypeptide
  REGION 1..219: note = XENP024361 3H3_H1_L2.1_Fab-[anti-ICOS]_H0L0_Fab Light Chain 1

SEQ ID NO: 29842 - protein, 214 aa, synthetic construct; identical to SEQ ID NO: 26297
  REGION 1..214: note = Description of Artificial Sequence: Synthetic polypeptide
  REGION 1..214: note = XENP024361 3H3_H1_L2.1_Fab-[anti-ICOS]_H0L0_Fab Light Chain 2

SEQ ID NO: 29843 - protein, 447 aa, synthetic construct; identical to SEQ ID NO: 27117
  REGION 1..447: note = Description of Artificial Sequence: Synthetic polypeptide
  REGION 1..447: note = XENP021748 YW243.55.S70[PD-L1]_H0L0_Fab-[anti-ICOS]_H0L0_scFv Fab-Fc Heavy Chain

SEQ ID NO: 29844 - protein, 483 aa, synthetic construct; identical to SEQ ID NO: 26827
  REGION 1..483: note = Description of Artificial Sequence: Synthetic polypeptide
  REGION 1..483: note = XENP021748 YW243.55.S70[PD-L1]_H0L0_Fab-[anti-ICOS]_H0L0_scFv scFv-Fc Heavy Chain

SEQ ID NO: 29845 - protein, 214 aa, synthetic construct; identical to SEQ ID NO: 27132
  REGION 1..214: note = Description of Artificial Sequence: Synthetic polypeptide
  REGION 1..214: note = XENP021748 YW243.55.S70[PD-L1]_H0L0_Fab-[anti-ICOS]_H0L0_scFv Light Chain

SEQ ID NO: 29846 - protein, 450 aa, synthetic construct; identical to SEQ ID NO: 27137
  REGION 1..450: note = Description of Artificial Sequence: Synthetic polypeptide
  REGION 1..450: note = XENP024129 durvalumab[PD-L1]_H1L1_Fab-[anti-ICOS]_H0L0_scFv Fab -Fc Heavy Chain

SEQ ID NO: 29847 - protein, 483 aa, synthetic construct; identical to SEQ ID NO: 26827
  REGION 1..483: note = Description of Artificial Sequence: Synthetic polypeptide
  REGION 1..483: note = XENP024129 durvalumab[PD-L1]_H1L1_Fab-[anti-ICOS]_H0L0_scFv scFv -Fc Heavy Chain

SEQ ID NO: 29848 - protein, 215 aa, synthetic construct; identical to SEQ ID NO: 27152
  REGION 1..215: note = Description of Artificial Sequence: Synthetic polypeptide
  REGION 1..215: note = XENP024129 durvalumab[PD-L1]_H1L1_Fab-[anti-ICOS]_H0L0_scFv Light Chain

SEQ ID NO: 29849 - protein, 449 aa, synthetic construct; identical to SEQ ID NO: 27157
  REGION 1..449: note = Description of Artificial Sequence: Synthetic polypeptide
  REGION 1..449: note = XENP024131 avelumab[PD-L1]_H1L1_Fab-[anti-ICOS]_H0L0_scFv Fab-Fc Heavy Chain

SEQ ID NO: 29850 - protein, 483 aa, synthetic construct; identical to SEQ ID NO: 26827
  REGION 1..483: note = Description of Artificial Sequence: Synthetic polypeptide
  REGION 1..483: note = XENP024131 avelumab[PD-L1]_H1L1_Fab-[anti-ICOS]_H0L0_scFv scFv-Fc Heavy Chain

SEQ ID NO: 29851 - protein, 216 aa, synthetic construct; identical to SEQ ID NO: 27172
  REGION 1..216: note = Description of Artificial Sequence: Synthetic polypeptide
  REGION 1..216: note = XENP024131 avelumab[PD-L1]_H1L1_Fab-[anti-ICOS]_H0L0_scFv Light Chain

SEQ ID NO: 29852 - protein, 721 aa, synthetic construct; identical to SEQ ID NO: 27177
  REGION 1..721: note = Description of Artificial Sequence: Synthetic polypeptide
  REGION 1..721: note = XENP024124 durvalumab[PD-L1]_H1L1_Fab_(G4S)2_[anti-ICOS]_H0L0_ scFv20_Fc_IgG1 Heavy Chain

SEQ ID NO: 29853 - protein, 215 aa, synthetic construct; identical to SEQ ID NO: 27152
  REGION 1..215: note = Description of Artificial Sequence: Synthetic polypeptide
  REGION 1..215: note = XENP024124 durvalumab[PD-L1]_H1L1_Fab_(G4S)2_[anti-ICOS]_H0L0_ scFv20_Fc_IgG1 Light Chain

SEQ ID NO: 29854 - protein, 454 aa, synthetic construct; identical to SEQ ID NO: 26442
  REGION 1..454: note = Description of Artificial Sequence: Synthetic polypeptide
  REGION 1..454: note = XENP020266 [ICOS]_H0L0 one-arm mAb Fab-Fc Heavy Chain

SEQ ID NO: 29855 - protein, 231 aa, synthetic construct; identical to SEQ ID NO: 27198
  REGION 1..231: note = Description of Artificial Sequence: Synthetic polypeptide
  REGION 1..231: note = XENP020266 [ICOS]_H0L0 one-arm mAb Fc-only Heavy Chain

SEQ ID NO: 29856 - protein, 214 aa, synthetic construct; identical to SEQ ID NO: 26297
  REGION 1..214: note = Description of Artificial Sequence: Synthetic polypeptide
  REGION 1..214: note = XENP020266 [ICOS]_H0L0 one-arm mAb Light Chain

SEQ ID NO: 29857 - protein, 452 aa, synthetic construct; identical to SEQ ID NO: 26682
  REGION 1..452: note = Description of Artificial Sequence: Synthetic polypeptide
  REGION 1..452: note = XENP021861 GSK_314.8[ICOS]_H0L0 one-arm mAb Fab-Fc Heavy Chain

SEQ ID NO: 29858 - protein, 231 aa, synthetic construct; identical to SEQ ID NO: 27198
  REGION 1..231: note = Description of Artificial Sequence: Synthetic polypeptide
  REGION 1..231: note = XENP021861 GSK_314.8[ICOS]_H0L0 one-arm mAb Fc-only Heavy Chain

SEQ ID NO: 29859 - protein, 219 aa, synthetic construct; identical to SEQ ID NO: 26307
  REGION 1..219: note = Description of Artificial Sequence: Synthetic polypeptide
  REGION 1..219: note = XENP021861 GSK_314.8[ICOS]_H0L0 one-arm mAb Light Chain

SEQ ID NO: 29860 - protein, 454 aa, synthetic construct; identical to SEQ ID NO: 26722
  REGION 1..454: note = Description of Artificial Sequence: Synthetic polypeptide
  REGION 1..454: note = XENP021863 jMab-138[ICOS]_H0L0 one-arm mAb Fab-Fc Heavy Chain

SEQ ID NO: 29861 - protein, 231 aa, synthetic construct; identical to SEQ ID NO: 27198
  REGION 1..231: note = Description of Artificial Sequence: Synthetic polypeptide
  REGION 1..231: note = XENP021863 jMab-138[ICOS]_H0L0 one-arm mAb Fc-only Heavy Chain

SEQ ID NO: 29862 - protein, 216 aa, synthetic construct; identical to SEQ ID NO: 26327
  REGION 1..216: note = Description of Artificial Sequence: Synthetic polypeptide
  REGION 1..216: note = XENP021863 jMab-138[ICOS]_H0L0 one-arm mAb Light Chain

SEQ ID NO: 29863 - protein, 450 aa, synthetic construct; identical to SEQ ID NO: 26762
  REGION 1..450: note = Description of Artificial Sequence: Synthetic polypeptide
  REGION 1..450: note = XENP022349 WO2016059602[ICOS]_GSK_H0L0 one-arm mAb Fab-Fc Heavy Chain

SEQ ID NO: 29864 - protein, 231 aa, synthetic construct; identical to SEQ ID NO: 27198
  REGION 1..231: note = Description of Artificial Sequence: Synthetic polypeptide
  REGION 1..231: note = XENP022349 WO2016059602[ICOS]_GSK_H0L0 one-arm mAb Fc-only Heavy Chain

SEQ ID NO: 29865 - protein, 213 aa, synthetic construct; identical to SEQ ID NO: 26347
  REGION 1..213: note = Description of Artificial Sequence: Synthetic polypeptide
  REGION 1..213: note = XENP022349 WO2016059602[ICOS]_GSK_H0L0 one-arm mAb Light Chain

SEQ ID NO: 29866 - protein, 454 aa, synthetic construct; identical to SEQ ID NO: 26442
  REGION 1..454: note = Description of Artificial Sequence: Synthetic polypeptide
  REGION 1..454: note = XENP022439 [ICOS]_H0_L0.5 one-arm mAb Fab-Fc Heavy Chain

SEQ ID NO: 29867 - protein, 231 aa, synthetic construct; identical to SEQ ID NO: 27198
  REGION 1..231: note = Description of Artificial Sequence: Synthetic polypeptide
  REGION 1..231: note = XENP022439 [ICOS]_H0_L0.5 one-arm mAb Fc-only Heavy Chain

SEQ ID NO: 29868 - protein, 214 aa, synthetic construct; identical to SEQ ID NO: 27243
  REGION 1..214: note = Description of Artificial Sequence: Synthetic polypeptide
  REGION 1..214: note = XENP022439 [ICOS]_H0_L0.5 one-arm mAb Light Chain

SEQ ID NO: 29869 - protein, 454 aa, synthetic construct; identical to SEQ ID NO: 26442
  REGION 1..454: note = Description of Artificial Sequence: Synthetic polypeptide
  REGION 1..454: note = XENP022440 [ICOS]_H0_L0.7 one-arm mAb Fab-Fc Heavy Chain

SEQ ID NO: 29870 - protein, 231 aa, synthetic construct; identical to SEQ ID NO: 27198
  REGION 1..231: note = Description of Artificial Sequence: Synthetic polypeptide
  REGION 1..231: note = XENP022440 [ICOS]_H0_L0.7 one-arm mAb Fc-only Heavy Chain

SEQ ID NO: 29871 - protein, 214 aa, synthetic construct; identical to SEQ ID NO: 26477
  REGION 1..214: note = Description of Artificial Sequence: Synthetic polypeptide
  REGION 1..214: note = XENP022440 [ICOS]_H0_L0.7 one-arm mAb Light Chain

SEQ ID NO: 29872 - protein, 454 aa, synthetic construct; identical to SEQ ID NO: 26442
  REGION 1..454: note = Description of Artificial Sequence: Synthetic polypeptide
  REGION 1..454: note = XENP022441 [ICOS]_H0_L0.9 one-arm mAb Fab-Fc Heavy Chain

SEQ ID NO: 29873 - protein, 231 aa, synthetic construct; identical to SEQ ID NO: 27198
  REGION 1..231: note = Description of Artificial Sequence: Synthetic polypeptide
  REGION 1..231: note = XENP022441 [ICOS]_H0_L0.9 one-arm mAb Fc-only Heavy Chain

SEQ ID NO: 29874 - protein, 214 aa, synthetic construct; identical to SEQ ID NO: 27265
  REGION 1..214: note = Description of Artificial Sequence: Synthetic polypeptide
  REGION 1..214: note = XENP022441 [ICOS]_H0_L0.9 one-arm mAb Light Chain

SEQ ID NO: 29875 - protein, 454 aa, synthetic construct; identical to SEQ ID NO: 26442
  REGION 1..454: note = Description of Artificial Sequence: Synthetic polypeptide
  REGION 1..454: note = XENP022442 [ICOS]_H0_L0.10 one-arm mAb Fab-Fc Heavy Chain

SEQ ID NO: 29876 - protein, 231 aa, synthetic construct; identical to SEQ ID NO: 27198
  REGION 1..231: note = Description of Artificial Sequence: Synthetic polypeptide
  REGION 1..231: note = XENP022442 [ICOS]_H0_L0.10 one-arm mAb Fc-only Heavy Chain

SEQ ID NO: 29877 - protein, 214 aa, synthetic construct; identical to SEQ ID NO: 27276
  REGION 1..214: note = Description of Artificial Sequence: Synthetic polypeptide
  REGION 1..214: note = XENP022442 [ICOS]_H0_L0.10 one-arm mAb Light Chain

SEQ ID NO: 29878 - protein, 454 aa, synthetic construct; identical to SEQ ID NO: 26442
  REGION 1..454: note = Description of Artificial Sequence: Synthetic polypeptide
  REGION 1..454: note = XENP022443 [ICOS]_H0_L0.14 one-arm mAb Fab-Fc Heavy Chain

SEQ ID NO: 29879 - protein, 231 aa, synthetic construct; identical to SEQ ID NO: 27198
  REGION 1..231: note = Description of Artificial Sequence: Synthetic polypeptide
  REGION 1..231: note = XENP022443 [ICOS]_H0_L0.14 one-arm mAb Fc-only Heavy Chain

SEQ ID NO: 29880 - protein, 214 aa, synthetic construct; identical to SEQ ID NO: 27287
  REGION 1..214: note = Description of Artificial Sequence: Synthetic polypeptide
  REGION 1..214: note = XENP022443 [ICOS]_H0_L0.14 one-arm mAb Light Chain

SEQ ID NO: 29881 - protein, 454 aa, synthetic construct; identical to SEQ ID NO: 26442
  REGION 1..454: note = Description of Artificial Sequence: Synthetic polypeptide
  REGION 1..454: note = XENP022444 [ICOS]_H0_L0.15 one-arm mAb Fab-Fc Heavy Chain

SEQ ID NO: 29882 - protein, 231 aa, synthetic construct; identical to SEQ ID NO: 27198
  REGION 1..231: note = Description of Artificial Sequence: Synthetic polypeptide
  REGION 1..231: note = XENP022444 [ICOS]_H0_L0.15 one-arm mAb Fc-only Heavy Chain

SEQ ID NO: 29883 - protein, 214 aa, synthetic construct; identical to SEQ ID NO: 27298
  REGION 1..214: note = Description of Artificial Sequence: Synthetic polypeptide
  REGION 1..214: note = XENP022444 [ICOS]_H0_L0.15 one-arm mAb Light Chain

SEQ ID NO: 29884 - protein, 454 aa, synthetic construct; identical to SEQ ID NO: 26442
  REGION 1..454: note = Description of Artificial Sequence: Synthetic polypeptide
  REGION 1..454: note = XENP022445 [ICOS]_H0_L0.20 one-arm mAb Fab-Fc Heavy Chain

SEQ ID NO: 29885 - protein, 231 aa, synthetic construct; identical to SEQ ID NO: 27198
  REGION 1..231: note = Description of Artificial Sequence: Synthetic polypeptide
  REGION 1..231: note = XENP022445 [ICOS]_H0_L0.20 one-arm mAb Fc-only Heavy Chain

SEQ ID NO: 29886 - protein, 214 aa, synthetic construct; identical to SEQ ID NO: 27309
  REGION 1..214: note = Description of Artificial Sequence: Synthetic polypeptide
  REGION 1..214: note = XENP022445 [ICOS]_H0_L0.20 one-arm mAb Light Chain

SEQ ID NO: 29887 - protein, 454 aa, synthetic construct; identical to SEQ ID NO: 26442
  REGION 1..454: note = Description of Artificial Sequence: Synthetic polypeptide
  REGION 1..454: note = XENP022766 [ICOS]_H0_L0.38 one-arm mAb Fab-Fc Heavy Chain

SEQ ID NO: 29888 - protein, 231 aa, synthetic construct; identical to SEQ ID NO: 27198
  REGION 1..231: note = Description of Artificial Sequence: Synthetic polypeptide
  REGION 1..231: note = XENP022766 [ICOS]_H0_L0.38 one-arm mAb Fc-only Heavy Chain

SEQ ID NO: 29889 - protein, 214 aa, synthetic construct; identical to SEQ ID NO: 26557
  REGION 1..214: note = Description of Artificial Sequence: Synthetic polypeptide
  REGION 1..214: note = XENP022766 [ICOS]_H0_L0.38 one-arm mAb Light Chain

SEQ ID NO: 29890 - protein, 454 aa, synthetic construct; identical to SEQ ID NO: 26562
  REGION 1..454: note = Description of Artificial Sequence: Synthetic polypeptide
  REGION 1..454: note = XENP023096 [ICOS]_H0.66_L0 one-arm mAb Fab-Fc Heavy Chain

SEQ ID NO: 29891 - protein, 231 aa, synthetic construct; identical to SEQ ID NO: 27198
  REGION 1..231: note = Description of Artificial Sequence: Synthetic polypeptide
  REGION 1..231: note = XENP023096 [ICOS]_H0.66_L0 one-arm mAb Fc-only Heavy Chain

SEQ ID NO: 29892 - protein, 214 aa, synthetic construct; identical to SEQ ID NO: 26297
  REGION 1..214: note = Description of Artificial Sequence: Synthetic polypeptide
  REGION 1..214: note = XENP023096 [ICOS]_H0.66_L0 one-arm mAb Light Chain

SEQ ID NO: 29893 - protein, 447 aa, synthetic construct; identical to SEQ ID NO: 26382
  REGION 1..447: note = Description of Artificial Sequence: Synthetic polypeptide
  REGION 1..447: note = XENP023377 11D4[OX40]_H0L0_Fab-1G6_L1.194_H1.279_scFv Fab-Fc Heavy Chain

SEQ ID NO: 29894 - protein, 480 aa, synthetic construct; identical to SEQ ID NO: 2870
  REGION 1..480: note = Description of Artificial Sequence: Synthetic polypeptide
  REGION 1..480: note = XENP023377 11D4[OX40]_H0L0_Fab-1G6_L1.194_H1.279_scFv scFv-Fc Heavy Chain

SEQ ID NO: 29895 - protein, 214 aa, synthetic construct; identical to SEQ ID NO: 26277
  REGION 1..214: note = Description of Artificial Sequence: Synthetic polypeptide
  REGION 1..214: note = XENP023377 11D4[OX40]_H0L0_Fab-1G6_L1.194_H1.279_scFv Light Chain

SEQ ID NO: 29896 - protein, 451 aa, synthetic construct; identical to SEQ ID NO: 26402
  REGION 1..451: note = Description of Artificial Sequence: Synthetic polypeptide
  REGION 1..451: note = XENP023378 1D8[GITR]_H0L0_Fab-1G6_L1.194_H1.279_scFv Fab-Fc Heavy Chain

SEQ ID NO: 29897 - protein, 480 aa, synthetic construct; identical to SEQ ID NO: 2870
  REGION 1..480: note = Description of Artificial Sequence: Synthetic polypeptide
  REGION 1..480: note = XENP023378 1D8[GITR]_H0L0_Fab-1G6_L1.194_H1.279_scFv scFv-Fc Heavy Chain

SEQ ID NO: 29898 - protein, 219 aa, synthetic construct; identical to SEQ ID NO: 26287
  REGION 1..219: note = Description of Artificial Sequence: Synthetic polypeptide
  REGION 1..219: note = XENP023378 1D8[GITR]_H0L0_Fab-1G6_L1.194_H1.279_scFv Light Chain

SEQ ID NO: 29899 - protein, 450 aa, synthetic construct; identical to SEQ ID NO: 26422
  REGION 1..450: note = Description of Artificial Sequence: Synthetic polypeptide
  REGION 1..450: note = XENP023379 20H4.9[4-1BB]_H0L0_Fab-1G6_L1.194_H1.279_scFv Fab -Fc Heavy Chain

SEQ ID NO: 29900 - protein, 480 aa, synthetic construct; identical to SEQ ID NO: 2870
  REGION 1..480: note = Description of Artificial Sequence: Synthetic polypeptide
  REGION 1..480: note = XENP023379 20H4.9[4-1BB]_H0L0_Fab-1G6_L1.194_H1.279_scFv scFv -Fc Heavy Chain

SEQ ID NO: 29901 - protein, 216 aa, synthetic construct; identical to SEQ ID NO: 26267
  REGION 1..216: note = Description of Artificial Sequence: Synthetic polypeptide
  REGION 1..216: note = XENP023379 20H4.9[4-1BB]_H0L0_Fab-1G6_L1.194_H1.279_scFv Light Chain

SEQ ID NO: 29902 - protein, 447 aa, synthetic construct; identical to SEQ ID NO: 27396
  REGION 1..447: note = Description of Artificial Sequence: Synthetic polypeptide
  REGION 1..447: note = XENP019192 ipilimumab[CTLA-4]_H0L0_Fab-[anti-ICOS]-H0L0_scFv Fab-Fc Heavy Chain

SEQ ID NO: 29903 - protein, 483 aa, synthetic construct; identical to SEQ ID NO: 26827
  REGION 1..483: note = Description of Artificial Sequence: Synthetic polypeptide
  REGION 1..483: note = XENP019192 ipilimumab[CTLA-4]_H0L0_Fab-[anti-ICOS]-H0L0_scFv scFv-Fc Heavy Chain

SEQ ID NO: 29904 - protein, 215 aa, synthetic construct; identical to SEQ ID NO: 7600
  REGION 1..215: note = Description of Artificial Sequence: Synthetic polypeptide
  REGION 1..215: note = XENP019192 ipilimumab[CTLA-4]_H0L0_Fab-[anti-ICOS]-H0L0_scFv Light Chain

SEQ ID NO: 29905 - protein, 450 aa, synthetic construct; identical to SEQ ID NO: 26262
  REGION 1..450: note = Description of Artificial Sequence: Synthetic polypeptide
  REGION 1..450: note = XENP014410 20H4.9[4-1BB]_H0L0_IgG1_PVA_/S267K Heavy Chain

SEQ ID NO: 29906 - protein, 216 aa, synthetic construct; identical to SEQ ID NO: 26267
  REGION 1..216: note = Description of Artificial Sequence: Synthetic polypeptide
  REGION 1..216: note = XENP014410 20H4.9[4-1BB]_H0L0_IgG1_PVA_/S267K Light Chain

SEQ ID NO: 29907 - protein, 447 aa, synthetic construct; identical to SEQ ID NO: 26272
  REGION 1..447: note = Description of Artificial Sequence: Synthetic polypeptide
  REGION 1..447: note = XENP016437 11D4[OX40]_H0L0_IgG1_PVA_/S267K Heavy Chain

SEQ ID NO: 29908 - protein, 214 aa, synthetic construct; identical to SEQ ID NO: 26277
  REGION 1..214: note = Description of Artificial Sequence: Synthetic polypeptide
  REGION 1..214: note = XENP016437 11D4[OX40]_H0L0_IgG1_PVA_/S267K Light Chain

SEQ ID NO: 29909 - protein, 451 aa, synthetic construct; identical to SEQ ID NO: 26282
  REGION 1..451: note = Description of Artificial Sequence: Synthetic polypeptide
  REGION 1..451: note = XENP016438 1D8[GITR]_H0L0_IgG1_PVA_/S267K Heavy Chain

SEQ ID NO: 29910 - protein, 219 aa, synthetic construct; identical to SEQ ID NO: 26287
  REGION 1..219: note = Description of Artificial Sequence: Synthetic polypeptide
  REGION 1..219: note = XENP016438 1D8[GITR]_H0L0_IgG1_PVA_/S267K Light Chain

SEQ ID NO: 29911 - protein, 452 aa, synthetic construct; identical to SEQ ID NO: 26302
  REGION 1..452: note = Description of Artificial Sequence: Synthetic polypeptide
  REGION 1..452: note = XENP021820 GSK_314.8[ICOS]_H0L0_IgG1_PVA_/S267K Heavy Chain

SEQ ID NO: 29912 - protein, 219 aa, synthetic construct; identical to SEQ ID NO: 26307
  REGION 1..219: note = Description of Artificial Sequence: Synthetic polypeptide
  REGION 1..219: note = XENP021820 GSK_314.8[ICOS]_H0L0_IgG1_PVA_/S267K Light Chain

SEQ ID NO: 29913 - protein, 453 aa, synthetic construct; identical to SEQ ID NO: 26312
  REGION 1..453: note = Description of Artificial Sequence: Synthetic polypeptide
  REGION 1..453: note = XENP021821 GSK_88.2[ICOS]_H0L0_IgG1_PVA_/S267K Heavy Chain

SEQ ID NO: 29914 - protein, 219 aa, synthetic construct; identical to SEQ ID NO: 26317
  REGION 1..219: note = Description of Artificial Sequence: Synthetic polypeptide
  REGION 1..219: note = XENP021821 GSK_88.2[ICOS]_H0L0_IgG1_PVA_/S267K Light Chain

SEQ ID NO: 29915 - protein, 454 aa, synthetic construct; identical to SEQ ID NO: 26322
  REGION 1..454: note = Description of Artificial Sequence: Synthetic polypeptide
  REGION 1..454: note = XENP021822 jMab-138[ICOS]_H0L0_IgG1_PVA_/S267K Heavy Chain

SEQ ID NO: 29916 - protein, 216 aa, synthetic construct; identical to SEQ ID NO: 26327
  REGION 1..216: note = Description of Artificial Sequence: Synthetic polypeptide
  REGION 1..216: note = XENP021822 jMab-138[ICOS]_H0L0_IgG1_PVA_/S267K Light Chain

SEQ ID NO: 29917 - protein, 454 aa, synthetic construct; identical to SEQ ID NO: 26332
  REGION 1..454: note = Description of Artificial Sequence: Synthetic polypeptide
  REGION 1..454: note = XENP021823 jMab-139[ICOS]_H0L0_IgG1_PVA_/S267K Heavy Chain

SEQ ID NO: 29918 - protein, 216 aa, synthetic construct; identical to SEQ ID NO: 26337
  REGION 1..216: note = Description of Artificial Sequence: Synthetic polypeptide
  REGION 1..216: note = XENP021823 jMab-139[ICOS]_H0L0_IgG1_PVA_/S267K Light Chain

SEQ ID NO: 29919 - protein, 450 aa, synthetic construct; identical to SEQ ID NO: 26342
  REGION 1..450: note = Description of Artificial Sequence: Synthetic polypeptide
  REGION 1..450: note = XENP022346 WO2016059602_GSK[ICOS]_H0L0_IgG1_PVA_/S267K Heavy Chain

SEQ ID NO: 29920 - protein, 213 aa, synthetic construct; identical to SEQ ID NO: 26347
  REGION 1..213: note = Description of Artificial Sequence: Synthetic polypeptide
  REGION 1..213: note = XENP022346 WO2016059602_GSK[ICOS]_H0L0_IgG1_PVA_/S267K Light Chain

SEQ ID NO: 29921 - protein, 446 aa, synthetic construct; identical to SEQ ID NO: 26352
  REGION 1..446: note = Description of Artificial Sequence: Synthetic polypeptide
  REGION 1..446: note = XENP023057 Jounce_37A10S713[ICOS]_H0L0_IgG1_PVA_/S267K Heavy Chain

SEQ ID NO: 29922 - protein, 218 aa, synthetic construct; identical to SEQ ID NO: 26357
  REGION 1..218: note = Description of Artificial Sequence: Synthetic polypeptide
  REGION 1..218: note = XENP023057 Jounce_37A10S713[ICOS]_H0L0_IgG1_PVA_/S267K Light Chain

SEQ ID NO: 29923 - protein, 447 aa, synthetic construct; identical to SEQ ID NO: 27506
  REGION 1..447: note = Description of Artificial Sequence: Synthetic polypeptide
  REGION 1..447: note = XENP016434 YW243.55.S70[PD-L1]_H0L0_IgG1_PVA_/S267K Heavy Chain

SEQ ID NO: 29924 - protein, 214 aa, synthetic construct; identical to SEQ ID NO: 27132
  REGION 1..214: note = Description of Artificial Sequence: Synthetic polypeptide
  REGION 1..214: note = XENP016434 YW243.55.S70[PD-L1]_H0L0_IgG1_PVA_/S267K Light Chain

SEQ ID NO: 29925 - protein, 449 aa, synthetic construct; identical to SEQ ID NO: 27516
  REGION 1..449: note = Description of Artificial Sequence: Synthetic polypeptide
  REGION 1..449: note = XENP024118 avelumab[PD-L1]_H1L1_IgG1_PVA_/S267K Heavy Chain

SEQ ID NO: 29926 - protein, 216 aa, synthetic construct; identical to SEQ ID NO: 27172
  REGION 1..216: note = Description of Artificial Sequence: Synthetic polypeptide
  REGION 1..216: note = XENP024118 avelumab[PD-L1]_H1L1_IgG1_PVA_/S267K Light Chain

SEQ ID NO: 29927 - protein, 450 aa, synthetic construct; identical to SEQ ID NO: 27526
  REGION 1..450: note = Description of Artificial Sequence: Synthetic polypeptide
  REGION 1..450: note = XENP024119 durvalumab[PD-L1]_H1L1_IgG1_PVA_/S267K Heavy Chain

SEQ ID NO: 29928 - protein, 215 aa, synthetic construct; identical to SEQ ID NO: 27152
  REGION 1..215: note = Description of Artificial Sequence: Synthetic polypeptide
  REGION 1..215: note = XENP024119 durvalumab[PD-L1]_H1L1_IgG1_PVA_/S267K Light Chain

SEQ ID NO: 29929 - protein, 456 aa, synthetic construct; identical to SEQ ID NO: 27536
  REGION 1..456: note = Description of Artificial Sequence: Synthetic polypeptide
  REGION 1..456: note = XENP024120 LOPD180[PD-1]_H1L1_IgG1_PVA_/S267K Heavy Chain

SEQ ID NO: 29930 - protein, 216 aa, synthetic construct; identical to SEQ ID NO: 26837
  REGION 1..216: note = Description of Artificial Sequence: Synthetic polypeptide
  REGION 1..216: note = XENP024120 LOPD180[PD-1]_H1L1_IgG1_PVA_/S267K Light Chain

SEQ ID NO: 29931 - protein, 448 aa, synthetic construct; identical to SEQ ID NO: 27546
  REGION 1..448: note = Description of Artificial Sequence: Synthetic polypeptide
  REGION 1..448: note = XENP024121 mAb7(1.2)[PD-1]_H1L1_IgG1_PVA_/S267K Heavy Chain

SEQ ID NO: 29932 - protein, 218 aa, synthetic construct; identical to SEQ ID NO: 27551
  REGION 1..218: note = Description of Artificial Sequence: Synthetic polypeptide
  REGION 1..218: note = XENP024121 mAb7(1.2)[PD-1]_H1L1_IgG1_PVA_/S267K Light Chain

SEQ ID NO: 29933 - protein, 452 aa, synthetic construct; identical to SEQ ID NO: 26682
  REGION 1..452: note = Description of Artificial Sequence: Synthetic polypeptide
  REGION 1..452: note = XENP021832 GSK_314.8[ICOS]_H0L0_Fab-YW243.55.S70[PD-L1]_H0L0_ scFv Fab-Fc Heavy Chain

SEQ ID NO: 29934 - protein, 471 aa, synthetic construct; identical to SEQ ID NO: 27561
  REGION 1..471: note = Description of Artificial Sequence: Synthetic polypeptide
  REGION 1..471: note = XENP021832 GSK_314.8[ICOS]_H0L0_Fab-YW243.55.S70[PD-L1]_H0L0_ scFv scFv-Fc Heavy Chain

SEQ ID NO: 29935 - protein, 219 aa, synthetic construct; identical to SEQ ID NO: 26307
  REGION 1..219: note = Description of Artificial Sequence: Synthetic polypeptide
  REGION 1..219: note = XENP021832 GSK_314.8[ICOS]_H0L0_Fab-YW243.55.S70[PD-L1]_H0L0_ scFv Light Chain

SEQ ID NO: 29936 - protein, 453 aa, synthetic construct; identical to SEQ ID NO: 26702
  REGION 1..453: note = Description of Artificial Sequence: Synthetic polypeptide
  REGION 1..453: note = XENP021833 GSK_88.2[ICOS]_H0L0_Fab-YW243.55.S70[PD-L1]_H0L0_scFv Fab-Fc Heavy Chain

SEQ ID NO: 29937 - protein, 471 aa, synthetic construct; identical to SEQ ID NO: 27561
  REGION 1..471: note = Description of Artificial Sequence: Synthetic polypeptide
  REGION 1..471: note = XENP021833 GSK_88.2[ICOS]_H0L0_Fab-YW243.55.S70[PD-L1]_H0L0_scFv scFv-Fc Heavy Chain

SEQ ID NO: 29938 - protein, 219 aa, synthetic construct; identical to SEQ ID NO: 26317
  REGION 1..219: note = Description of Artificial Sequence: Synthetic polypeptide
  REGION 1..219: note = XENP021833 GSK_88.2[ICOS]_H0L0_Fab-YW243.55.S70[PD-L1]_H0L0_scFv Light Chain

SEQ ID NO: 29939 - protein, 454 aa, synthetic construct; identical to SEQ ID NO: 26722
  REGION 1..454: note = Description of Artificial Sequence: Synthetic polypeptide
  REGION 1..454: note = XENP021834 jMab-138[ICOS]_H0L0_Fab-YW243.55.S70[PD-L1]_H0L0_scFv Fab-Fc Heavy Chain

SEQ ID NO: 29940 - protein, 471 aa, synthetic construct; identical to SEQ ID NO: 27561
  REGION 1..471: note = Description of Artificial Sequence: Synthetic polypeptide
  REGION 1..471: note = XENP021834 jMab-138[ICOS]_H0L0_Fab-YW243.55.S70[PD-L1]_H0L0_scFv scFv-Fc Heavy Chain

SEQ ID NO: 29941 - protein, 216 aa, synthetic construct; identical to SEQ ID NO: 26327
  REGION 1..216: note = Description of Artificial Sequence: Synthetic polypeptide
  REGION 1..216: note = XENP021834 jMab-138[ICOS]_H0L0_Fab-YW243.55.S70[PD-L1]_H0L0_scFv Light Chain

SEQ ID NO: 29942 - protein, 454 aa, synthetic construct; identical to SEQ ID NO: 26742
  REGION 1..454: note = Description of Artificial Sequence: Synthetic polypeptide
  REGION 1..454: note = XENP021835 jMab-139[ICOS]_H0L0_Fab-YW243.55.S70[PD-L1]_H0L0_scFv Fab-Fc Heavy Chain

SEQ ID NO: 29943 - protein, 471 aa, synthetic construct; identical to SEQ ID NO: 27561
  REGION 1..471: note = Description of Artificial Sequence: Synthetic polypeptide
  REGION 1..471: note = XENP021835 jMab-139[ICOS]_H0L0_Fab-YW243.55.S70[PD-L1]_H0L0_scFv scFv-Fc Heavy Chain

SEQ ID NO: 29944 - protein, 216 aa, synthetic construct; identical to SEQ ID NO: 26337
  REGION 1..216: note = Description of Artificial Sequence: Synthetic polypeptide
  REGION 1..216: note = XENP021835 jMab-139[ICOS]_H0L0_Fab-YW243.55.S70[PD-L1]_H0L0_scFv Light Chain

SEQ ID NO: 29945 - protein, 454 aa, synthetic construct; identical to SEQ ID NO: 26442
  REGION 1..454: note = Description of Artificial Sequence: Synthetic polypeptide
  REGION 1..454: note = XENP021836 jMab-136[ICOS]_H0L0_Fab-YW243.55.S70[PD-L1]_H0L0_scFv Fab-Fc Heavy Chain

SEQ ID NO: 29946 - protein, 471 aa, synthetic construct; identical to SEQ ID NO: 27561
  REGION 1..471: note = Description of Artificial Sequence: Synthetic polypeptide
  REGION 1..471: note = XENP021836 jMab-136[ICOS]_H0L0_Fab-YW243.55.S70[PD-L1]_H0L0_scFv scFv-Fc Heavy Chain

SEQ ID NO: 29947 - protein, 214 aa, synthetic construct; identical to SEQ ID NO: 26297
  REGION 1..214: note = Description of Artificial Sequence: Synthetic polypeptide
  REGION 1..214: note = XENP021836 jMab-136[ICOS]_H0L0_Fab-YW243.55.S70[PD-L1]_H0L0_scFv Light Chain

SEQ ID NO: 29948 - protein, 442 aa, synthetic construct; identical to SEQ ID NO: 26802
  REGION 1..442: note = Description of Artificial Sequence: Synthetic polypeptide
  REGION 1..442: note = XENP018920 nivolumab[PD-1]_H0L0_Fab-[anti-ICOS]_H0L0_scFv Fab-Fc Heavy Chain

SEQ ID NO: 29949 - protein, 471 aa, synthetic construct; identical to SEQ ID NO: 26807
  REGION 1..471: note = Description of Artificial Sequence: Synthetic polypeptide
  REGION 1..471: note = XENP018920 nivolumab[PD-1]_H0L0_Fab-[anti-ICOS]_H0L0_scFv scFv-Fc Heavy Chain

SEQ ID NO: 29950 - protein, 214 aa, synthetic construct; identical to SEQ ID NO: 16146
  REGION 1..214: note = Description of Artificial Sequence: Synthetic polypeptide
  REGION 1..214: note = XENP018920 nivolumab[PD-1]_H0L0_Fab-[anti-ICOS]_H0L0_scFv Light Chain

SEQ ID NO: 29951 - protein, 456 aa, synthetic construct; identical to SEQ ID NO: 26822
  REGION 1..456: note = Description of Artificial Sequence: Synthetic polypeptide
  REGION 1..456: note = XENP024130 LOPD180[PD-1]_H1L1_Fab-[anti-ICOS]_H0L0_scFv Fab-Fc Heavy Chain

SEQ ID NO: 29952 - protein, 483 aa, synthetic construct; identical to SEQ ID NO: 26827
  REGION 1..483: note = Description of Artificial Sequence: Synthetic polypeptide
  REGION 1..483: note = XENP024130 LOPD180[PD-1]_H1L1_Fab-[anti-ICOS]_H0L0_scFv scFv-Fc Heavy Chain

SEQ ID NO: 29953 - protein, 216 aa, synthetic construct; identical to SEQ ID NO: 26837
  REGION 1..216: note = Description of Artificial Sequence: Synthetic polypeptide
  REGION 1..216: note = XENP024130 LOPD180[PD-1]_H1L1_Fab-[anti-ICOS]_H0L0_scFv Light Chain

SEQ ID NO: 29954 - protein, 452 aa, synthetic construct; identical to SEQ ID NO: 26682
  REGION 1..452: note = Description of Artificial Sequence: Synthetic polypeptide
  REGION 1..452: note = XENP021828 GSK_314.8[ICOS]_H0L0_Fab-1G6_L1.194_H1.279_scFv Fab-Fc Heavy Chain

SEQ ID NO: 29955 - protein, 480 aa, synthetic construct; identical to SEQ ID NO: 2870
  REGION 1..480: note = Description of Artificial Sequence: Synthetic polypeptide
  REGION 1..480: note = XENP021828 GSK_314.8[ICOS]_H0L0_Fab-1G6_L1.194_H1.279_scFv scFv-Fc Heavy Chain

SEQ ID NO: 29956 - protein, 219 aa, synthetic construct; identical to SEQ ID NO: 26307
  REGION 1..219: note = Description of Artificial Sequence: Synthetic polypeptide
  REGION 1..219: note = XENP021828 GSK_314.8[ICOS]_H0L0_Fab-1G6_L1.194_H1.279_scFv Light Chain

SEQ ID NO: 29957 - protein, 453 aa, synthetic construct; identical to SEQ ID NO: 26702
  REGION 1..453: note = Description of Artificial Sequence: Synthetic polypeptide
  REGION 1..453: note = XENP021829 GSK_88.2[ICOS]_H0L0_Fab-1G6_L1.194_H1.279_scFv Fab-Fc Heavy Chain

SEQ ID NO: 29958 - protein, 480 aa, synthetic construct; identical to SEQ ID NO: 2870
  REGION 1..480: note = Description of Artificial Sequence: Synthetic polypeptide
  REGION 1..480: note = XENP021829 GSK_88.2[ICOS]_H0L0_Fab-1G6_L1.194_H1.279_scFv scFv-Fc Heavy Chain

SEQ ID NO: 29959 - protein, 219 aa, synthetic construct; identical to SEQ ID NO: 26317
  REGION 1..219: note = Description of Artificial Sequence: Synthetic polypeptide
  REGION 1..219: note = XENP021829 GSK_88.2[ICOS]_H0L0_Fab-1G6_L1.194_H1.279_scFv Light Chain

SEQ ID NO: 29960 - protein, 454 aa, synthetic construct; identical to SEQ ID NO: 26722
  REGION 1..454: note = Description of Artificial Sequence: Synthetic polypeptide
  REGION 1..454: note = XENP021830 jMab-138[ICOS]_H0L0_Fab-1G6_L1.194_H1.279_scFv Fab-Fc Heavy Chain

SEQ ID NO: 29961 - protein, 480 aa, synthetic construct; identical to SEQ ID NO: 2870
  REGION 1..480: note = Description of Artificial Sequence: Synthetic polypeptide
  REGION 1..480: note = XENP021830 jMab-138[ICOS]_H0L0_Fab-1G6_L1.194_H1.279_scFv scFv-Fc Heavy Chain

SEQ ID NO: 29962 - protein, 216 aa, synthetic construct; identical to SEQ ID NO: 26327
  REGION 1..216: note = Description of Artificial Sequence: Synthetic polypeptide
  REGION 1..216: note = XENP021830 jMab-138[ICOS]_H0L0_Fab-1G6_L1.194_H1.279_scFv Light Chain

SEQ ID NO: 29963 - protein, 454 aa, synthetic construct; identical to SEQ ID NO: 26742
  REGION 1..454: note = Description of Artificial Sequence: Synthetic polypeptide
  REGION 1..454: note = XENP021831 jMab-139[ICOS]_H0L0_Fab-1G6_L1.194_H1.279_scFv Fab-Fc Heavy Chain

SEQ ID NO: 29964 - protein, 480 aa, synthetic construct; identical to SEQ ID NO: 2870
  REGION 1..480: note = Description of Artificial Sequence: Synthetic polypeptide
  REGION 1..480: note = XENP021831 jMab-139[ICOS]_H0L0_Fab-1G6_L1.194_H1.279_scFv scFv-Fc Heavy Chain

SEQ ID NO: 29965 - protein, 216 aa, synthetic construct; identical to SEQ ID NO: 26337
  REGION 1..216: note = Description of Artificial Sequence: Synthetic polypeptide
  REGION 1..216: note = XENP021831 jMab-139[ICOS]_H0L0_Fab-1G6_L1.194_H1.279_scFv Light Chain

SEQ ID NO: 29966 - protein, 450 aa, synthetic construct; identical to SEQ ID NO: 26762
  REGION 1..450: note = Description of Artificial Sequence: Synthetic polypeptide
  REGION 1..450: note = XENP022348 WO2016059602_GSK_H0L0_Fab-1G6_L1.194_H1.279_scFv Fab-Fc Heavy Chain

SEQ ID NO: 29967 - protein, 480 aa, synthetic construct; identical to SEQ ID NO: 2870
  REGION 1..480: note = Description of Artificial Sequence: Synthetic polypeptide
  REGION 1..480: note = XENP022348 WO2016059602_GSK_H0L0_Fab-1G6_L1.194_H1.279_scFv scFv-Fc Heavy Chain

SEQ ID NO: 29968 - protein, 213 aa, synthetic construct; identical to SEQ ID NO: 26347
  REGION 1..213: note = Description of Artificial Sequence: Synthetic polypeptide
  REGION 1..213: note = XENP022348 WO2016059602_GSK_H0L0_Fab-1G6_L1.194_H1.279_scFv Light Chain

SEQ ID NO: 29969 - protein, 447 aa, synthetic construct; identical to SEQ ID NO: 27117
  REGION 1..447: note = Description of Artificial Sequence: Synthetic polypeptide
  REGION 1..447: note = XENP021748 YW243.55.S70[PD-L1]_H0L0_Fab-[anti-ICOS]_H0L0_scFv Fab-Fc Heavy Chain

SEQ ID NO: 29970 - protein, 483 aa, synthetic construct; identical to SEQ ID NO: 26827
  REGION 1..483: note = Description of Artificial Sequence: Synthetic polypeptide
  REGION 1..483: note = XENP021748 YW243.55.S70[PD-L1]_H0L0_Fab-[anti-ICOS]_H0L0_scFv scFv-Fc Heavy Chain

SEQ ID NO: 29971 - protein, 214 aa, synthetic construct; identical to SEQ ID NO: 27132
  REGION 1..214: note = Description of Artificial Sequence: Synthetic polypeptide
  REGION 1..214: note = XENP021748 YW243.55.S70[PD-L1]_H0L0_Fab-[anti-ICOS]_H0L0_scFv Light Chain

SEQ ID NO: 29972 - protein, 454 aa, synthetic construct; identical to SEQ ID NO: 26442
  REGION 1..454: note = Description of Artificial Sequence: Synthetic polypeptide
  REGION 1..454: note = XENP021749 [anti-ICOS]_H0L0_Fab-[anti-CTLA-4]_H3.23_L0.129_scFv Fab-Fc Heavy Chain

SEQ ID NO: 29973 - protein, 477 aa, synthetic construct; identical to SEQ ID NO: 2394
  REGION 1..477: note = Description of Artificial Sequence: Synthetic polypeptide
  REGION 1..477: note = XENP021749 [anti-ICOS]_H0L0_Fab-[anti-CTLA-4]_H3.23_L0.129_scFv scFv-Fc Heavy Chain

SEQ ID NO: 29974 - protein, 214 aa, synthetic construct; identical to SEQ ID NO: 26297
  REGION 1..214: note = Description of Artificial Sequence: Synthetic polypeptide
  REGION 1..214: note = XENP021749 [anti-ICOS]_H0L0_Fab-[anti-CTLA-4]_H3.23_L0.129_scFv Light Chain

SEQ ID NO: 29975 - protein, 452 aa, synthetic construct; identical to SEQ ID NO: 26682
  REGION 1..452: note = Description of Artificial Sequence: Synthetic polypeptide
  REGION 1..452: note = XENP021861 GSK_314.8[ICOS]_H0L0 one-arm mAb Fab-Fc Heavy Chain

SEQ ID NO: 29976 - protein, 231 aa, synthetic construct; identical to SEQ ID NO: 27198
  REGION 1..231: note = Description of Artificial Sequence: Synthetic polypeptide
  REGION 1..231: note = XENP021861 GSK_314.8[ICOS]_H0L0 one-arm mAb Fc-only Heavy Chain

SEQ ID NO: 29977 - protein, 219 aa, synthetic construct; identical to SEQ ID NO: 26307
  REGION 1..219: note = Description of Artificial Sequence: Synthetic polypeptide
  REGION 1..219: note = XENP021861 GSK_314.8[ICOS]_H0L0 one-arm mAb Light Chain

SEQ ID NO: 29978 - protein, 454 aa, synthetic construct; identical to SEQ ID NO: 26722
  REGION 1..454: note = Description of Artificial Sequence: Synthetic polypeptide
  REGION 1..454: note = XENP021863 jMab-138[ICOS]_H0L0 one-arm mAb Fab-Fc Heavy Chain

SEQ ID NO: 29979 - protein, 231 aa, synthetic construct; identical to SEQ ID NO: 27198
  REGION 1..231: note = Description of Artificial Sequence: Synthetic polypeptide
  REGION 1..231: note = XENP021863 jMab-138[ICOS]_H0L0 one-arm mAb Fc-only Heavy Chain

SEQ ID NO: 29980 - protein, 216 aa, synthetic construct; identical to SEQ ID NO: 26327
  REGION 1..216: note = Description of Artificial Sequence: Synthetic polypeptide
  REGION 1..216: note = XENP021863 jMab-138[ICOS]_H0L0 one-arm mAb Light Chain

SEQ ID NO: 29981 - protein, 450 aa, synthetic construct; identical to SEQ ID NO: 26762
  REGION 1..450: note = Description of Artificial Sequence: Synthetic polypeptide
  REGION 1..450: note = XENP022349 WO2016059602[ICOS]_GSK_H0L0 one-arm mAb Fab-Fc Heavy Chain

SEQ ID NO: 29982 - protein, 231 aa, synthetic construct; identical to SEQ ID NO: 27198
  REGION 1..231: note = Description of Artificial Sequence: Synthetic polypeptide
  REGION 1..231: note = XENP022349 WO2016059602[ICOS]_GSK_H0L0 one-arm mAb Fc-only Heavy Chain

SEQ ID NO: 29983 - protein, 213 aa, synthetic construct; identical to SEQ ID NO: 26347
  REGION 1..213: note = Description of Artificial Sequence: Synthetic polypeptide
  REGION 1..213: note = XENP022349 WO2016059602[ICOS]_GSK_H0L0 one-arm mAb Light Chain

SEQ ID NO: 29984 - protein, 329 aa, synthetic construct; identical to SEQ ID NO: 28669
  REGION 1..329: note = Description of Artificial Sequence: Synthetic polypeptide
  REGION 1..329: note = monomer 1 (Fab-scFv side)

SEQ ID NO: 29985 - protein, 329 aa, synthetic construct
  REGION 1..329: note = Description of Artificial Sequence: Synthetic polypeptide
  REGION 1..329: note = monomer 2 (Fab side)
ASTKGPSVFPLAPSSKSTSGGTAALGCLVKDYFPEPVTVSWNSGALTSGVHTFPAVLQSSGLYSLSSVVTVPSSSLGTQTYICNVNHKPSDTKVDKKVEPKSSDKTHTCPPCPAPPVAGPSVFLFPPKPKDTLMISRTPEVTCVVVDVKHEDPEVKFNWYVDGVEVHNAKTKPREEQYNSTYRVVSVLTVLHQDWLNGKEYKCKVSNKALPAPIEKTISKAKGQPREPQVYTLPPSREQMTKNQVKLTCLVKGFYPSDIAVEWESNGQPENNYKTTPPVLDSDGSFFLYSKLTVDKSRWQQGNVFSCSVMHEALHNHYTQKSLSLSPGK

SEQ ID NO: 29986 - protein, 107 aa, synthetic construct [sequence omitted]

SEQ ID NO: 29987 - protein, 329 aa, synthetic construct; identical to SEQ ID NO: 28669
  REGION 1..329: note = Description of Artificial Sequence: Synthetic polypeptide
  REGION 1..329: note = Fab-scFv-Hc - 356D/358L allotype

SEQ ID NO: 29988 - protein, 329 aa, synthetic construct
  REGION 1..329: note = Description of Artificial Sequence: Synthetic polypeptide
  REGION 1..329: note = mAb-scFv Fab-Hc - 356D/358L allotype
ASTKGPSVFPLAPSSKSTSGGTAALGCLVKDYFPEPVTVSWNSGALTSGVHTFPAVLQSSGLYSLSSVVTVPSSSLGTQTYICNVNHKPSDTKVDKKVEPKSSDKTHTCPPCPAPPVAGPSVFLFPPKPKDTLMISRTPEVTCVVVDVKHEDPEVKFNWYVDGVEVHNAKTKPREEQYNSTYRVVSVLTVLHQDWLNGKEYKCKVSNKALPAPIEKTISKAKGQPREPQVYTLPPSRDQLTKNQVKLTCLVKGFYPSDIAVEWESNGQPENNYKTTPPVLDSDGSFFLYSKLTVDKSRWQQGNVFSCSVMHEALHNHYTQKSLSLSPGK

SEQ ID NO: 29989 - protein, 329 aa, synthetic construct; identical to SEQ ID NO: 28680
  REGION 1..329: note = Description of Artificial Sequence: Synthetic polypeptide
  REGION 1..329: note = mAb-scFv Fab-scFv-Hc - N297A

SEQ ID NO: 29990 - protein, 329 aa, synthetic construct
  REGION 1..329: note = Description of Artificial Sequence: Synthetic polypeptide
  REGION 1..329: note = mAb-scFv Fab-Hc - N297A
ASTKGPSVFPLAPSSKSTSGGTAALGCLVKDYFPEPVTVSWNSGALTSGVHTFPAVLQSSGLYSLSSVVTVPSSSLGTQTYICNVNHKPSDTKVDKKVEPKSSDKTHTCPPCPAPPVAGPSVFLFPPKPKDTLMISRTPEVTCVVVDVKHEDPEVKFNWYVDGVEVHNAKTKPREEQYASTYRVVSVLTVLHQDWLNGKEYKCKVSNKALPAPIEKTISKAKGQPREPQVYTLPPSREQMTKNQVKLTCLVKGFYPSDIAVEWESNGQPENNYKTTPPVLDSDGSFFLYSKLTVDKSRWQQGNVFSCSVMHEALHNHYTQKSLSLSPGK

SEQ ID NO: 29991 - protein, 329 aa, synthetic construct; identical to SEQ ID NO: 28682
  REGION 1..329: note = Description of Artificial Sequence: Synthetic polypeptide
  REGION 1..329: note = mAb-scFv Fab-scFv-Hc - N297S

SEQ ID NO: 29992 - protein, 329 aa, synthetic construct
  REGION 1..329: note = Description of Artificial Sequence: Synthetic polypeptide
  REGION 1..329: note = mAb-scFv Fab-Hc - N297S
ASTKGPSVFPLAPSSKSTSGGTAALGCLVKDYFPEPVTVSWNSGALTSGVHTFPAVLQSSGLYSLSSVVTVPSSSLGTQTYICNVNHKPSDTKVDKKVEPKSSDKTHTCPPCPAPPVAGPSVFLFPPKPKDTLMISRTPEVTCVVVDVKHEDPEVKFNWYVDGVEVHNAKTKPREEQYSSTYRVVSVLTVLHQDWLNGKEYKCKVSNKALPAPIEKTISKAKGQPREPQVYTLPPSREQMTKNQVKLTCLVKGFYPSDIAVEWESNGQPENNYKTTPPVLDSDGSFFLYSKLTVDKSRWQQGNVFSCSVMHEALHNHYTQKSLSLSPGK

SEQ ID NO: 29993 - protein, 327 aa, synthetic construct; identical to SEQ ID NO: 28684
  REGION 1..327: note = Description of Artificial Sequence: Synthetic polypeptide
  REGION 1..327: note = mAb-scFv Fab-scFv-IgG4-Hc

SEQ ID NO: 29994 - protein, 327 aa, synthetic construct
  REGION 1..327: note = Description of Artificial Sequence: Synthetic polypeptide
  REGION 1..327: note = mAb-scFv Fab-IgG4-Hc
ASTKGPSVFPLAPCSRSTSESTAALGCLVKDYFPEPVTVSWNSGALTSGVHTFPAVLQSSGLYSLSSVVTVPSSSLGTKTYTCNVDHKPSDTKVDKRVESKYGPPCPPCPAPEFLGGPSVFLFPPKPKDTLMISRTPEVTCVVVDVKQEDPEVQFNWYVDGVEVHNAKTKPREEQFNSTYRVVSVLTVLHQDWLNGKEYKCKVSNKGLPSSIEKTISKAKGQPREPQVYTLPPSQEQMTKNQVKLTCLVKGFYPSDIAVEWESNGQPENNYKTTPPVLDSDGSFFLYSKLTVDKSRWQEGNVFSCSVMHEALHNHYTQKSLSLSLGK

SEQ ID NO: 29995 - protein, 326 aa, synthetic construct; identical to SEQ ID NO: 28686
  REGION 1..326: note = Description of Artificial Sequence: Synthetic polypeptide
  REGION 1..326: note = mAb-scFv Fab-scFv-IgG2-Hc - without S267K

SEQ ID NO: 29996 - protein, 326 aa, synthetic construct
  REGION 1..326: note = Description of Artificial Sequence: Synthetic polypeptide
  REGION 1..326: note = mAb-scFv Fab-IgG2-Hc - without S267K
ASTKGPSVFPLAPCSRSTSESTAALGCLVKDYFPEPVTVSWNSGALTSGVHTFPAVLQSSGLYSLSSVVTVPSSNFGTQTYTCNVDHKPSDTKVDKTVERKCSVECPPCPAPPVAGPSVFLFPPKPKDTLMISRTPEVTCVVVDVSHEDPEVQFNWYVDGVEVHNAKTKPREEQFNSTFRVVSVLTVVHQDWLNGKEYKCKVSNKGLPAPIEKTISKTKGQPREPQVYTLPPSREQMTKNQVKLTCLVKGFYPSDIAVEWESNGQPENNYKTTPPMLDSDGSFFLYSKLTVDKSRWQQGNVFSCSVMHEALHNHYTQKSLSLSPGK

SEQ ID NO: 29997 - protein, 326 aa, synthetic construct; identical to SEQ ID NO: 28688
  REGION 1..326: note = Description of Artificial Sequence: Synthetic polypeptide
  REGION 1..326: note = mAb-scFv Fab-scFv-IgG2-Hc - with S267K

SEQ ID NO: 29998 - protein, 326 aa, synthetic construct
  REGION 1..326: note = Description of Artificial Sequence: Synthetic polypeptide
  REGION 1..326: note = mAb-scFv Fab-IgG2-Hc - with S267K
ASTKGPSVFPLAPCSRSTSESTAALGCLVKDYFPEPVTVSWNSGALTSGVHTFPAVLQSSGLYSLSSVVTVPSSNFGTQTYTCNVDHKPSDTKVDKTVERKCSVECPPCPAPPVAGPSVFLFPPKPKDTLMISRTPEVTCVVVDVKHEDPEVQFNWYVDGVEVHNAKTKPREEQFNSTFRVVSVLTVVHQDWLNGKEYKCKVSNKGLPAPIEKTISKTKGQPREPQVYTLPPSREQMTKNQVKLTCLVKGFYPSDIAVEWESNGQPENNYKTTPPMLDSDGSFFLYSKLTVDKSRWQQGNVFSCSVMHEALHNHYTQKSLSLSPGK

SEQ ID NO: 29999 - protein, 120 aa, synthetic construct [sequence omitted]

SEQ ID NO: 30000 - protein, 111 aa, synthetic construct [sequence omitted]

SEQ ID NO: 30001 - protein, 113 aa, synthetic construct [sequence omitted]

SEQ ID NO: 30002 - protein, 107 aa, synthetic construct [sequence omitted]

SEQ ID NO: 30003 - protein, 117 aa, synthetic construct
  REGION 1..117: note = Description of Artificial Sequence: Synthetic polypeptide
  REGION 1..117: note = Teva pidilizumab VH
QVQLVQSGSELKKPGASVKISCKASGYTFTNYGMNWVRQAPGQGLQWMGWINTDSGESTYAEEFKGRFVFSLDTSVNTAYLQITSLTAEDTGMYFCVRVGYDALDYWGQGTLVTVSS

SEQ ID NO: 30004 - protein, 106 aa, synthetic construct
  REGION 1..106: note = Description of Artificial Sequence: Synthetic polypeptide
  REGION 1..106: note = Teva pidilizumab VL
EIVLTQSPSSLSASVGDRVTITCSARSSVSYMHWFQQKPGKAPKLWIYRTSNLASGVPSRFSGSGSGTSYCLTINSLQPEDFATYYCQQRSSFPLTFGGGTKLEIK

SEQ ID NO: 30005 - protein, 120 aa, synthetic construct [sequence omitted]

SEQ ID NO: 30006 - protein, 111 aa, synthetic construct [sequence omitted]

SEQ ID NO: 30007 - protein, 117 aa, synthetic construct
  REGION 1..117: note = Description of Artificial Sequence: Synthetic polypeptide
  REGION 1..117: note = Novartis/Dana Farber BAP049 clone E VH
EVQLVQSGAEVKKPGESLRISCKGSGYTFTTYWMHWVRQATGQGLEWMGNIYPGTGGSNFDEKFKNRVTITADKSTSTAYMELSSLRSEDTAVYYCTRWTTGTGAYWGQGTTVTVSS

SEQ ID NO: 30008 - protein, 113 aa, synthetic construct
  REGION 1..113: note = Description of Artificial Sequence: Synthetic polypeptide
  REGION 1..113: note = Novartis/Dana Farber BAP049 clone E VL
EIVLTQSPATLSLSPGERATLSCKSSQSLLDSGNQKNFLTWYQQKPGQAPRLLIYWASTRESGVPSRFSGSGSGTDFTFTISSLEAEDAATYYCQNDYSYPYTFGQGTKVEIK

SEQ ID NO: 30009 - protein, 117 aa, synthetic construct; identical to SEQ ID NO: 30007
  REGION 1..117: note = Description of Artificial Sequence: Synthetic polypeptide
  REGION 1..117: note = Novartis/Dana Farber BAP049 clone B VH

SEQ ID NO: 30010 - protein, 113 aa, synthetic construct
  REGION 1..113: note = Description of Artificial Sequence: Synthetic polypeptide
  REGION 1..113: note = Novartis/Dana Farber BAP049 clone B VL
EIVLTQSPATLSLSPGERATLSCKSSQSLLDSGNQKNFLTWYQQKPGKAPKLLIYWASTRESGVPSRFSGSGSGTDFTFTISSLQPEDIATYYCQNDYSYPYTFGQGTKVEIK

SEQ ID NO: 30011 - protein, 117 aa, synthetic construct [sequence omitted]

SEQ ID NO: 30012 - protein, 107 aa, synthetic construct [sequence omitted]

SEQ ID NO: 30013 - protein, 122 aa, synthetic construct
  REGION 1..122: note = Description of Artificial Sequence: Synthetic polypeptide
  REGION 1..122: note = Medimmune h1H3 Var 6 VH
EVQLVESGGGLVQPGGSLRLSCAASGFTFSDYGMHWVRQAPGKGLEWVAYISSGSYTIYYADSVKGRFTISRDNAKNTLYLQMSSLRAEDTAVYYCARRGYGSFYEYYFDYWGQGTTVTVSS

SEQ ID NO: 30014 - protein, 106 aa, synthetic construct
  REGION 1..106: note = Description of Artificial Sequence: Synthetic polypeptide
  REGION 1..106: note = Medimmune h1H3 Var 6 VL
QIVLTQSPATLSLSPGERATLSCSASSSVSYMYWYQQKPGQAPRLLIYLTSNRATGIPARFSGSGSGTDYTLTISSLEPEDFAVYYCQQWSSNPFTFGQGTKLEIK

SEQ ID NO: 30015 - protein, 116 aa, synthetic construct
  REGION 1..116: note = Description of Artificial Sequence: Synthetic polypeptide
  REGION 1..116: note = Tesarao TSR-042/APE2058 VH
EVQLLESGGGLVQPGGSLRLSCAASGFTFSSYDMSWVRQAPGKGLEWVSTISGGGSYTYYQDSVKGRFTISRDNSKNTLYLQMNSLRAEDTAVYYCASPYYAMDYWGQGTTVTVSS

SEQ ID NO: 30016 - protein, 107 aa, synthetic construct
  REGION 1..107: note = Description of Artificial Sequence: Synthetic polypeptide
  REGION 1..107: note = Tesarao TSR-042/APE2058 VL
DIQLTQSPSFLSAYVGDRVTITCKASQDVGTAVAWYQQKPGKAPKLLIYWASTLHTGVPSRFSGSGSGTEFTLTISSLQPEDFATYYCQHYSSYPWTFGQGTKLEIK

SEQ ID NO: 30017 - protein, 116 aa, synthetic construct
  REGION 1..116: note = Description of Artificial Sequence: Synthetic polypeptide
  REGION 1..116: note = Incyte Camrelizumab VH
EVQLVESGGGLVQPGGSLRLSCAASGFTFSSYMMSWVRQAPGKGLEWVATISGGGANTYYPDSVKGRFTISRDNAKNSLYLQMNSLRAEDTAVYYCARQLYYFDYWGQGTTVTVSS

SEQ ID NO: 30018 - protein, 107 aa, synthetic construct
  REGION 1..107: note = Description of Artificial Sequence: Synthetic polypeptide
  REGION 1..107: note = Incyte Camrelizumab VL
DIQMTQSPSSLSASVGDRVTITCLASQTIGTWLTWYQQKPGKAPKLLIYTATSLADGVPSRFSGSGSGTDFTLTISSLQPEDFATYYCQQVYSIPWTFGGGTKVEIK

SEQ ID NO: 30019 - protein, 118 aa, synthetic construct
  REGION 1..118: note = Description of Artificial Sequence: Synthetic polypeptide
  REGION 1..118: note = Beigene 317-4B6 VH
QVQLQESGPGLVKPSETLSLTCTVSGFSLTSYGVHWIRQPPGKGLEWIGVIYADGSTNYNPSLKSRVTISKDTSKNQVSLKLSSVTAADTAVYYCARAYGNYWYIDVWGQGTTVTVSS

SEQ ID NO: 30020 - protein, 107 aa, synthetic construct
  REGION 1..107: note = Description of Artificial Sequence: Synthetic polypeptide
  REGION 1..107: note = Beigene 317-4B6 VL
DIVMTQSPDSLAVSLGERATINCKSSESVSNDVAWYQQKPGQPPKLLINYAFHRFTGVPDRFSGSGYGTDFTLTISSLQAEDVAVYYCHQAYSSPYTFGQGTKLEIK

SEQ ID NO: 30021 - protein, 114 aa, synthetic construct
  REGION 1..114: note = Description of Artificial Sequence: Synthetic polypeptide
  REGION 1..114: note = Beigene 326-4A3 VH
QVQLVQSGSELKKPGASVKVSCKASGYTFTNYGMNWVRQAPGQGLKWMGWINNNNAEPTYAQDFRGRFVFSLDTSASTAYLQISSLKTEDTAVYYCARDVMDYWGQGTLVTVSS

SEQ ID NO: 30022 - protein, 110 aa, synthetic construct
  REGION 1..110: note = Description of Artificial Sequence: Synthetic polypeptide
  REGION 1..110: note = Beigene 326-4A3 VL
DIVLTQSPASLAVSPGQRATITCRASESVDNYGYSFMHWYQQKPGQPPKLLIYRASNLESGVPARFSGSGSGTDFTLTINPVEAEDTANYYCQQSKEYPTFGGGTKVEIK

SEQ ID NO: 30023 - protein, 119 aa, synthetic construct; identical to SEQ ID NO: 27009
  REGION 1..119: note = Description of Artificial Sequence: Synthetic polypeptide
  REGION 1..119: note = Macrogenics mAb 7 (1.2) VH

SEQ ID NO: 30024 - protein, 111 aa, synthetic construct; identical to SEQ ID NO: 27008
  REGION 1..111: note = Description of Artificial Sequence: Synthetic polypeptide
  REGION 1..111: note = Macrogenics mAb 7 (1.2) VL

SEQ ID NO: 30025 - protein, 125 aa, synthetic construct [sequence omitted]

SEQ ID NO: 30026 - protein, 112 aa, synthetic construct [sequence omitted]

SEQ ID NO: 30027 - protein, 125 aa, synthetic construct
  REGION 1..125: note = Description of Artificial Sequence: Synthetic polypeptide
  REGION 1..125: note = Junmeng Clone 39 VH
QGQLVQSGAEVKKPGASVKVSCKASGYTFTDYEMHWVRQAPGQGLEWMGVIESETGGTAYNQKFKGRAKITADKSTSTAYMELSSLRSEDTAVYYCTREGITTVATTYYWYFDVWGQGTTVTVSS

SEQ ID NO: 30028 - protein, 112 aa, synthetic construct [sequence omitted]

SEQ ID NO: 30029 - protein, 125 aa, synthetic construct
  REGION 1..125: note = Description of Artificial Sequence: Synthetic polypeptide
  REGION 1..125: note = Junmeng Clone 41 VH
QGQLVQSGAEVKKPGASVKVSCKASGYTFTDYEMHWVRQAPGQGLEWMGVIESETGGTAYNQKFQGRVTLTADKSSSTAYMELSSLRSEDTAVYYCTREGITTVATTYYWYFDVWGQGTLVTVSS

SEQ ID NO: 30030 - protein, 112 aa, synthetic construct [sequence omitted]

SEQ ID NO: 30031 - protein, 125 aa, synthetic construct; identical to SEQ ID NO: 30027
  REGION 1..125: note = Description of Artificial Sequence: Synthetic polypeptide
  REGION 1..125: note = Junmeng Clone 48 VH

SEQ ID NO: 30032 - protein, 112 aa, synthetic construct
  REGION 1..112: note = Description of Artificial Sequence: Synthetic polypeptide
  REGION 1..112: note = Junmeng Clone 48 VL
DVVMTQSPLSLPVTLGQPASISCRSSQSIVHSNGNTYLEWYLQKPGQSPRLLIYKVSNRFSGVPDRFSGSGSGTDFTLKISRVEAEDVGVYYCFQGSHVPLTFGQGTKLEIK

SEQ ID NO: 30033 - protein, 128 aa, synthetic construct
  REGION 1..128: note = Description of Artificial Sequence: Synthetic polypeptide
  REGION 1..128: note = Wyeth PD1-17 VH
QVQLQESGPGVVKPSGTLSLTCAISGGSIGSGGSIRSTRWWSWVRQSPGKGLEWIGEIYHSGSTNYNPSLKSRVTISLDKSRNHFSLRLNSVTAADTAVYYCARQDYGDSGDWYFDLWGKGTMVTVSS

SEQ ID NO: 30034 - protein, 110 aa, synthetic construct
  REGION 1..110: note = Description of Artificial Sequence: Synthetic polypeptide
  REGION 1..110: note = Wyeth PD1-17 VL
NFMLTQPHSVSESPGKTVTISCTRSSGSIASNSVQWYQQRPGSSPTTVIYEDNQRPSGVPDRFSGSIDSSSNSASLTVSGLKTEDEADYYCQSSDSSAVVFGSGTKLTVL

SEQ ID NO: 30035 - protein, 119 aa, synthetic construct
  REGION 1..119: note = Description of Artificial Sequence: Synthetic polypeptide
  REGION 1..119: note = Wyeth PD1-28 VH
EVQLVQSGAEVKKPGASVKVSCKASGYRFTSYGISWVRQAPGQGLEWMGWISAYNGNTNYAQKLQGRVTMTTDTSTNTAYMELRSLRSDDTAVYYCARDADYSSGSGYWGQGTLVTVSS

SEQ ID NO: 30036 - protein, 108 aa, synthetic construct
  REGION 1..108: note = Description of Artificial Sequence: Synthetic polypeptide
  REGION 1..108: note = Wyeth PD1-28 VL
SYELTQPPSVSVSPGQTARITCSGDALPKQYAYWYQQKPGQAPVMVIYKDTERPSGIPERFSGSSSGTKVTLTISGVQAEDEADYYCQSADNSITYRVFGGGTKVTVL

SEQ ID NO: 30037 - protein, 119 aa, synthetic construct
  REGION 1..119: note = Description of Artificial Sequence: Synthetic polypeptide
  REGION 1..119: note = Wyeth PD1-33 VH
QVQLVQSGAEVKKPGASVRVSCKASGYTLTSYYIHWVRQAPGQGLEWMGIINPRGATISYAQKFQGRVTMTRDTSTSTVYMELRNLKSEDTALYYCATAGIYGFDFDYWGRGTLVTVSS

SEQ ID NO: 30038 - protein, 111 aa, synthetic construct
  REGION 1..111: note = Description of Artificial Sequence: Synthetic polypeptide
  REGION 1..111: note = Wyeth PD1-33 VL
QSALTQPASVSGSPGQSITISCTGTSNDVGGYNYVSWYQHHPGKAPKLIIYDVTNRPSGVSDRFSGSKSGNTASLTISGLLAEDEGDYYCSSYTIVTNFEVLFGGGTKLTV

SEQ ID NO: 30039 - protein, 127 aa, synthetic construct
  REGION 1..127: note = Description of Artificial Sequence: Synthetic polypeptide
  REGION 1..127: note = Wyeth PD1-35 VH
QVQLQESGPGLVKPSQTLSLTCTVSGGSISSGAYYWSWIRQHPGKGLEWIGYIYYNGNTYYNPSLRSLVTISVDASKNQFSLKLSSVTAADTAVYYCARASDYVWGGYRYMDAFDIWGRGTLITVSS

SEQ ID NO: 30040 - protein, 110 aa, synthetic construct
  REGION 1..110: note = Description of Artificial Sequence: Synthetic polypeptide
  REGION 1..110: note = Wyeth PD1-35 VL
QSVLTQPPSASGTPGQRVTISCSGSNSNIGSNSVNWYQQLPGTAPKLLIYGNNQRPSGVPDRFSGSKSGTSASLAISGLQSENEADYYCAAWDDSLNGPVFGRGTKVTVL

SEQ ID NO: 30041 - protein, 127 aa, synthetic construct; identical to SEQ ID NO: 26823
  REGION 1..127: note = Description of Artificial Sequence: Synthetic polypeptide
  REGION 1..127: note = Wyeth LOPD180 VH

SEQ ID NO: 30042 - protein, 110 aa, synthetic construct; identical to SEQ ID NO: 26838
  REGION 1..110: note = Description of Artificial Sequence: Synthetic polypeptide
  REGION 1..110: note = Wyeth LOPD180 VL

SEQ ID NO: 30043 - protein, 120 aa, synthetic construct
  REGION 1..120: note = Description of Artificial Sequence: Synthetic polypeptide
  REGION 1..120: note = UCB Ab948 VH
EVQLQESGPGLVKPSQTLSLTCTVTGYSITSDYAWNWIRQPPGKKLEWMGYINYSGSTSYNPSLKSRVTISRDTSKNQFSLKLSSVTAADTAVYYCARWIGSSAWYFDVWGQGTLVTVSS

SEQ ID NO: 30044 - protein, 112 aa, synthetic construct
  REGION 1..112: note = Description of Artificial Sequence: Synthetic polypeptide
  REGION 1..112: note = UCB Ab948 VL
DVLMTQTPLSLSVTPGQPASISCRSGQNIVHSNGNTYLEWYLQKPGQSPKLLIYKVSNRFFGVPDRISGSGSGTDFTLKISRVEAEDVGVYFCFQGSHVPFTFGQGTKLEIK

SEQ ID NO: 30045 - protein, 121 aa, synthetic construct
  REGION 1..121: note = Description of Artificial Sequence: Synthetic polypeptide
  REGION 1..121: note = Dana-Farber EH-12.2h7 VH
QVQLVQSGHEVKQPGASVKMSCKASGYSFTSSWIHWVRQAPGQGLEWIGYIYPSTGFTEYNQKFKDRATLTADKSTSTAYMELSSLRSEDTAVYYCARWRDSSGYHAMDYWGQGTLVTVSS

SEQ ID NO: 30046 - protein, 111 aa, synthetic construct
  REGION 1..111: note = Description of Artificial Sequence: Synthetic polypeptide
  REGION 1..111: note = Dana-Farber EH-12.2h7 VH
EIVLTQSPATLSLSPGQRLTISCRASQSVSTSGYSYMHWYQQKPDQSPKLLIKFGSNLESGIPARFSGSGSGTDFTLTISSLEPEDFATYYCQHSWEIPYTFGQGTKLEIK

SEQ ID NO: 30047 - protein, 119 aa, synthetic construct
  REGION 1..119: note = Description of Artificial Sequence: Synthetic polypeptide
  REGION 1..119: note = Sorrento RG1H10 VH
QVQLVQSGSELKKPGASVKISCKASGYIFSDNGVNWVRQAPGQGLEWMGWINTKIGNPTYAQGFTGRFVFSLDTSISTTYLQISSLQAGDTAVYYCAREHDYYYGMDVWGQGTTVTVSS

SEQ ID NO: 30048 - protein, 111 aa, synthetic construct
  REGION 1..111: note = Description of Artificial Sequence: Synthetic polypeptide
  REGION 1..111: note = Sorrento RG1H10 VL
QSALTQPPSASGSPGQSVTISCTGTSSDVGGYNYVSWYQHHPGKAPKLMIYEVSKRPSGVPDRFSGSKSAITASLTISGLLTEDEADYYCSAWDDSLNADVFGGGTKVTVL

SEQ ID NO: 30049 - protein, 119 aa, synthetic construct
  REGION 1..119: note = Description of Artificial Sequence: Synthetic polypeptide
  REGION 1..119: note = Sorrento RG1H10-H2A-22-1S VH
QVQLVQSGSELKKPGASVKISCKASGYIFSDNGVNWVRQAPGQGLEWMGWINTKDGNPTYAQGFTGRFVFSLDTSISTTYLQISSLQAGDTAVYYCAREHDYYYGMDVWGQGTTVTVSS

SEQ ID NO: 30050 - protein, 111 aa, synthetic construct; identical to SEQ ID NO: 30048
  REGION 1..111: note = Description of Artificial Sequence: Synthetic polypeptide
  REGION 1..111: note = Sorrento RG1H10-H2A-22-1S VL

SEQ ID NO: 30051 - protein, 119 aa, synthetic construct
  REGION 1..119: note = Description of Artificial Sequence: Synthetic polypeptide
  REGION 1..119: note = Sorrento RG1H10-H2A-27-2S VH
QVQLVQSGSELKKPGASVKISCKASGYIFSDNGVNWVRQAPGQGLEWMGWINTKTGNPTYAQGFTGRFVFSLDTSISTTYLQISSLQAGDTAVYYCAREHDYYYGMDVWGQGTTVTVSS

SEQ ID NO: 30052 - protein, 111 aa, synthetic construct; identical to SEQ ID NO: 30048
  REGION 1..111: note = Description of Artificial Sequence: Synthetic polypeptide
  REGION 1..111: note = Sorrento RG1H10-H2A-27-2S VL

SEQ ID NO: 30053 - protein, 119 aa, synthetic construct
  REGION 1..119: note = Description of Artificial Sequence: Synthetic polypeptide
  REGION 1..119: note = Sorrento RG1H10-3C VH
QVQLVQSGSELKKPGASVKISCKASGYTFSDNGVNWVRQAPGQGLEWMGWINTKDGNPTYAQGFTGRFVFSLDTSISTTYLQISSLQAGDTAVYYCAREHDYYYGMDVWGQGTTVTVSS

SEQ ID NO: 30054 - protein, 111 aa, synthetic construct; identical to SEQ ID NO: 30048
  REGION 1..111: note = Description of Artificial Sequence: Synthetic polypeptide
  REGION 1..111: note = Sorrento RG1H10-3C VL

SEQ ID NO: 30055 - protein, 118 aa, synthetic construct
  REGION 1..118: note = Description of Artificial Sequence: Synthetic polypeptide
  REGION 1..118: note = Sorrento RG1H10-16C VH
QVQLVQSGSELKKPGASVKISCKASGYTFSDNGVNWVRQAPGQGLEWMGWINTKTGNPTYAQGFTGRFVFSLDTSISTTYLQISSLQAGDTAVYYCAREHDYYYGMDVWGQGTTVTVS

SEQ ID NO: 30056 - protein, 111 aa, synthetic construct; identical to SEQ ID NO: 30048
  REGION 1..111: note = Description of Artificial Sequence: Synthetic polypeptide
  REGION 1..111: note = Sorrento RG1H10-16C VL

SEQ ID NO: 30057 - protein, 119 aa, synthetic construct
  REGION 1..119: note = Description of Artificial Sequence: Synthetic polypeptide
  REGION 1..119: note = Sorrento RG1H10-17C VH
QVQLVQSGSELKKPGASVKISCKASGYKFSDNGVNWVRQAPGQGLEWMGWINTKSGNPTYAQGFTGRFVFSLDTSISTTYLQISSLQAGDTAVYYCAREHDYYYGMDVWGQGTTVTVSS

SEQ ID NO: 30058 - protein, 111 aa, synthetic construct; identical to SEQ ID NO: 30048
  REGION 1..111: note = Description of Artificial Sequence: Synthetic polypeptide
  REGION 1..111: note = Sorrento RG1H10-17C VL

SEQ ID NO: 30059 - protein, 119 aa, synthetic construct
  REGION 1..119: note = Description of Artificial Sequence: Synthetic polypeptide
  REGION 1..119: note = Sorrento RG1H10-19C VH
QVQLVQSGSELKKPGASVKISCKASGYKFSDNGVNWVRQAPGQGLEWMGWINTKTGNPTYAQGFTGRFVFSLDTSISTTYLQISSLQAGDTAVYYCAREHDYYYGMDVWGQGTTVTVSS

SEQ ID NO: 30060 - protein, 111 aa, synthetic construct; identical to SEQ ID NO: 30048
  REGION 1..111: note = Description of Artificial Sequence: Synthetic polypeptide
  REGION 1..111: note = Sorrento RG1H10-19C VL

SEQ ID NO: 30061 - protein, 119 aa, synthetic construct
  REGION 1..119: note = Description of Artificial Sequence: Synthetic polypeptide
  REGION 1..119: note = Sorrento RG1H10-21C VH
QVQLVQSGSELKKPGASVKISCKASGYTFSDNGVNWVRQAPGQGLEWMGWINTKSGNPTYAQGFTGRFVFSLDTSISTTYLQISSLQAGDTAVYYCAREHDYYYGMDVWGQGTTVTVSS

SEQ ID NO: 30062 - protein, 111 aa, synthetic construct; identical to SEQ ID NO: 30048
  REGION 1..111: note = Description of Artificial Sequence: Synthetic polypeptide
  REGION 1..111: note = Sorrento RG1H10-21C VL

SEQ ID NO: 30063 - protein, 119 aa, synthetic construct
  REGION 1..119: note = Description of Artificial Sequence: Synthetic polypeptide
  REGION 1..119: note = Sorrento RG1H10-23C2 VH
QVQLVQSGSELKKPGASVKISCKASGYKFSDNGVNWVRQAPGQGLEWMGWINTKDGNPTYAQGFTGRFVFSLDTSISTTYLQISSLQAGDTAVYYCAREHDYYYGMDVWGQGTTVTVSS

SEQ ID NO: 30064 - protein, 111 aa, synthetic construct; identical to SEQ ID NO: 30048
  REGION 1..111: note = Description of Artificial Sequence: Synthetic polypeptide
  REGION 1..111: note = Sorrento RG1H10-23C2 VL

SEQ ID NO: 30065 - protein, 117 aa, synthetic construct
  REGION 1..117: note = Description of Artificial Sequence: Synthetic polypeptide
  REGION 1..117: note = Rinat mAb 7 VH
QVQLVQSGAEVKKPGASVKVSCKASGYTFTSYWINWVRQAPGQGLEWMGNIYPGSSLTNYNEKFKNRVTMTRDTSTSTVYMELSSLRSEDTAVYYCARLSTGTFAYWGQGTLVTVSS

SEQ ID NO: 30066 - protein, 113 aa, synthetic construct
  REGION 1..113: note = Description of Artificial Sequence: Synthetic polypeptide
  REGION 1..113: note = Rinat mAb 7 VL
DIVMTQSPDSLAVSLGERATINCKSSQSLWDSGNQKNFLTWYQQKPGQPPKLLIYWTSYRESGVPDRFSGSGSGTDFTLTISSLQAEDVAVYYCQNDYFYPHTFGGGTKVEIK

SEQ ID NO: 30067 - protein, 124 aa, synthetic construct
  REGION 1..124: note = Description of Artificial Sequence: Synthetic polypeptide
  REGION 1..124: note = Celgene PD1AB-6 VH
EVQLVQSGAEVKKPGATVKISCKASGFNIKDTYMHWVQQAPGKGLEWMGRIDPANGDRKYDPKFQGRVTITADTSTDTAYMELSSLRSEDTAVYYCARSGPVYYYGSSYVMDYWGQGTTVTVSS

SEQ ID NO: 30068 - protein, 112 aa, synthetic construct
  REGION 1..112: note = Description of Artificial Sequence: Synthetic polypeptide
  REGION 1..112: note = Celgene PD1AB-6 VL
DIVMTQSPDSLAVSLGERATINCKSGQSVLYSSNQKNFLAWYQQKPGQPPKLLIYWASTRESGVPDRFSGSGSGTDFTLTISSLQAEDVAVYYCHQYLYSWTFGQGTKLEIK

SEQ ID NO: 30069 - protein, 124 aa, synthetic construct; identical to SEQ ID NO: 26313
  REGION 1..124: note = Description of Artificial Sequence: Synthetic polypeptide
  REGION 1..124: note = GSK 88.2 VH

SEQ ID NO: 30070 - protein, 112 aa, synthetic construct; identical to SEQ ID NO: 26318
  REGION 1..112: note = Description of Artificial Sequence: Synthetic polypeptide
  REGION 1..112: note = GSK 88.2 VL

SEQ ID NO: 30071 - protein, 123 aa, synthetic construct; identical to SEQ ID NO: 26303
  REGION 1..123: note = Description of Artificial Sequence: Synthetic polypeptide
  REGION 1..123: note = GSK 314.8 VH

SEQ ID NO: 30072 - protein, 112 aa, synthetic construct; identical to SEQ ID NO: 26308
  REGION 1..112: note = Description of Artificial Sequence: Synthetic polypeptide
  REGION 1..112: note = GSK 314.8 VL

SEQ ID NO: 30073 - protein, 121 aa, synthetic construct; identical to SEQ ID NO: 26343
  REGION 1..121: note = Description of Artificial Sequence: Synthetic polypeptide
  REGION 1..121: note = GSK H2L5 VH

SEQ ID NO: 30074 - protein, 106 aa, synthetic construct; identical to SEQ ID NO: 26348
  REGION 1..106: note = Description of Artificial Sequence: Synthetic polypeptide
  REGION 1..106: note = GSK H2L5 VL

SEQ ID NO: 30075 - protein, 117 aa, synthetic construct; identical to SEQ ID NO: 26353
  REGION 1..117: note = Description of Artificial Sequence: Synthetic polypeptide
  REGION 1..117: note = Jounce 37A10S713 VH

SEQ ID NO: 30076 - protein, 111 aa, synthetic construct; identical to SEQ ID NO: 26358
  REGION 1..111: note = Description of Artificial Sequence: Synthetic polypeptide
  REGION 1..111: note = Jounce 37A10S713 VL

SEQ ID NO: 30077 - protein, 125 aa, synthetic construct; identical to SEQ ID NO: 26293
  REGION 1..125: note = Description of Artificial Sequence: Synthetic polypeptide
  REGION 1..125: note = Japan Tobacco Jmab-136 VH

SEQ ID NO: 30078 - protein, 107 aa, synthetic construct; identical to SEQ ID NO: 26298
  REGION 1..107: note = Description of Artificial Sequence: Synthetic polypeptide
  REGION 1..107: note = Japan Tobacco Jmab-136 VL

SEQ ID NO: 30079 - protein, 125 aa, synthetic construct; identical to SEQ ID NO: 26323
  REGION 1..125: note = Description of Artificial Sequence: Synthetic polypeptide
  REGION 1..125: note = Japan Tobacco Jmab-138 VH

SEQ ID NO: 30080 - protein, 109 aa, synthetic construct; identical to SEQ ID NO: 26328
  REGION 1..109: note = Description of Artificial Sequence: Synthetic polypeptide
  REGION 1..109: note = Japan Tobacco Jmab-138 VL

SEQ ID NO: 30081 - protein, 125 aa, synthetic construct; identical to SEQ ID NO: 26333
  REGION 1..125: note = Description of Artificial Sequence: Synthetic polypeptide
  REGION 1..125: note = Japan Tobacco Jmab-139 VH

SEQ ID NO: 30082 - protein, 109 aa, synthetic construct; identical to SEQ ID NO: 26338
  REGION 1..109: note = Description of Artificial Sequence: Synthetic polypeptide
  REGION 1..109: note = Japan Tobacco Jmab-139 VL

SEQ ID NO: 30083 - protein, 121 aa, synthetic construct; identical to SEQ ID NO: 3961
  REGION 1..121: note = Description of Artificial Sequence: Synthetic polypeptide
  REGION 1..121: note = AstraZeneca/Celgene/MedImmune 2.14H9 OPT VH

SEQ ID NO: 30084 - protein, 108 aa, synthetic construct; identical to SEQ ID NO: 3965
  REGION 1..108: note = Description of Artificial Sequence: Synthetic polypeptide
  REGION 1..108: note = AstraZeneca/Celgene/MedImmune 2.14H9 OPT VL

SEQ ID NO: 30085 - protein, 118 aa, synthetic construct; identical to SEQ ID NO: 3969
  REGION 1..118: note = Description of Artificial Sequence: Synthetic polypeptide
  REGION 1..118: note = Genentech atezolizumab VH

SEQ ID NO: 30086 - protein, 108 aa, synthetic construct; identical to SEQ ID NO: 3973
  REGION 1..108: note = Description of Artificial Sequence: Synthetic polypeptide
  REGION 1..108: note = Genentech atezolizumab VL

SEQ ID NO: 30087 - protein, 120 aa, synthetic construct; identical to SEQ ID NO: 3977
  REGION 1..120: note = Description of Artificial Sequence: Synthetic polypeptide
  REGION 1..120: note = Merck/Pfizer avelumab VH

SEQ ID NO: 30088 - protein, 110 aa, synthetic construct; identical to SEQ ID NO: 3981
  REGION 1..110: note = Description of Artificial Sequence: Synthetic polypeptide
  REGION 1..110: note = Merck/Pfizer avelumab VL

SEQ ID NO: 30089 - protein, 123 aa, synthetic construct; identical to SEQ ID NO: 3985
  REGION 1..123: note = Description of Artificial Sequence: Synthetic polypeptide
  REGION 1..123: note = Medarex 12A4 VH

SEQ ID NO: 30090 - protein, 106 aa, synthetic construct; identical to SEQ ID NO: 3989
  REGION 1..106: note = Description of Artificial Sequence: Synthetic polypeptide
  REGION 1..106: note = Medarex 12A4 VL

SEQ ID NO: 30091 - protein, 117 aa, synthetic construct; identical to SEQ ID NO: 3993
  REGION 1..117: note = Description of Artificial Sequence: Synthetic polypeptide
  REGION 1..117: note = Medarex 3G10 VH

SEQ ID NO: 30092 - protein, 107 aa, synthetic construct; identical to SEQ ID NO: 3997
  REGION 1..107: note = Description of Artificial Sequence: Synthetic polypeptide
  REGION 1..107: note = Medarex 3G10 VL

SEQ ID NO: 30093 - protein, 118 aa, synthetic construct; identical to SEQ ID NO: 4001
  REGION 1..118: note = Description of Artificial Sequence: Synthetic polypeptide
  REGION 1..118: note = Medarex 10A5 VH

SEQ ID NO: 30094 - protein, 107 aa, synthetic construct; identical to SEQ ID NO: 4005
  REGION 1..107: note = Description of Artificial Sequence: Synthetic polypeptide
  REGION 1..107: note = Medarex 10A5 VL

SEQ ID NO: 30095 - protein, 114 aa, synthetic construct; identical to SEQ ID NO: 4009
  REGION 1..114: note = Description of Artificial Sequence: Synthetic polypeptide
  REGION 1..114: note = Amplimmune/GSK/MedImmune h3D10 Var1 VH

SEQ ID NO: 30096 - protein, 106 aa, synthetic construct; identical to SEQ ID NO: 4013
  REGION 1..106: note = Description of Artificial Sequence: Synthetic polypeptide
  REGION 1..106: note = Amplimmune/GSK/MedImmune h3D10 Var1 VL

SEQ ID NO: 30097 - protein, 114 aa, synthetic construct; identical to SEQ ID NO: 4017
  REGION 1..114: note = Description of Artificial Sequence: Synthetic polypeptide
  REGION 1..114: note = Amplimmune/GSK/MedImmune h3D10 Var2 VH

SEQ ID NO: 30098 - protein, 106 aa, synthetic construct; identical to SEQ ID NO: 4021
  REGION 1..106: note = Description of Artificial Sequence: Synthetic polypeptide
  REGION 1..106: note = Amplimmune/GSK/MedImmune h3D10 Var2 VL

SEQ ID NO: 30099 - protein, 114 aa, synthetic construct; identical to SEQ ID NO: 4017
  REGION 1..114: note = Description of Artificial Sequence: Synthetic polypeptide
  REGION 1..114: note = Amplimmune/GSK/MedImmune h3D10 Var3 VH

SEQ ID NO: 30100 - protein, 106 aa, synthetic construct; identical to SEQ ID NO: 4029
  REGION 1..106: note = Description of Artificial Sequence: Synthetic polypeptide
  REGION 1..106: note = Amplimmune/GSK/MedImmune h3D10 Var3 VL

SEQ ID NO: 30101 - protein, 114 aa, synthetic construct; identical to SEQ ID NO: 4033
  REGION 1..114: note = Description of Artificial Sequence: Synthetic polypeptide
  REGION 1..114: note = Amplimmune/GSK/MedImmune h3D10 Var4 VH

SEQ ID NO: 30102 - protein, 106 aa, synthetic construct; identical to SEQ ID NO: 4021
  REGION 1..106: note = Description of Artificial Sequence: Synthetic polypeptide
  REGION 1..106: note = Amplimmune/GSK/MedImmune h3D10 Var4 VL

SEQ ID NO: 30103 - protein, 114 aa, synthetic construct; identical to SEQ ID NO: 4073
  REGION 1..114: note = Description of Artificial Sequence: Synthetic polypeptide
  REGION 1..114: note = Amplimmune/GSK/MedImmune h3D10 Var5 VH

SEQ ID NO: 30104 - protein, 106 aa, synthetic construct; identical to SEQ ID NO: 4069
  REGION 1..106: note = Description of Artificial Sequence: Synthetic polypeptide
  REGION 1..106: note = Amplimmune/GSK/MedImmune h3D10 Var5 VL

SEQ ID NO: 30105 - protein, 114 aa, synthetic construct; identical to SEQ ID NO: 4049
  REGION 1..114: note = Description of Artificial Sequence: Synthetic polypeptide
  REGION 1..114: note = Amplimmune/GSK/MedImmune h3D10 Var6 VH

SEQ ID NO: 30106 - protein, 106 aa, synthetic construct; identical to SEQ ID NO: 4013
  REGION 1..106: note = Description of Artificial Sequence: Synthetic polypeptide
  REGION 1..106: note = Amplimmune/GSK/MedImmune h3D10 Var6 VL

SEQ ID NO: 30107 - protein, 114 aa, synthetic construct; identical to SEQ ID NO: 4009
  REGION 1..114: note = Description of Artificial Sequence: Synthetic polypeptide
  REGION 1..114: note = Amplimmune/GSK/MedImmune h3D10 Var7 VH

SEQ ID NO: 30108 - protein, 106 aa, synthetic construct; identical to SEQ ID NO: 4053
  REGION 1..106: note = Description of Artificial Sequence: Synthetic polypeptide
  REGION 1..106: note = Amplimmune/GSK/MedImmune h3D10 Var7 VL

SEQ ID NO: 30109 - protein, 114 aa, synthetic construct; identical to SEQ ID NO: 4073
  REGION 1..114: note = Description of Artificial Sequence: Synthetic polypeptide
  REGION 1..114: note = Amplimmune/GSK/MedImmune h3D10 Var8 VH

SEQ ID NO: 30110 - protein, 106 aa, synthetic construct; identical to SEQ ID NO: 4029
  REGION 1..106: note = Description of Artificial Sequence: Synthetic polypeptide
  REGION 1..106: note = Amplimmune/GSK/MedImmune h3D10 Var8 VL

SEQ ID NO: 30111 - protein, 114 aa, synthetic construct; identical to SEQ ID NO: 4073
  REGION 1..114: note = Description of Artificial Sequence: Synthetic polypeptide
  REGION 1..114: note = Amplimmune/GSK/MedImmune h3D10 Var9 VH

SEQ ID NO: 30112 - protein, 106 aa, synthetic construct; identical to SEQ ID NO: 4061
  REGION 1..106: note = Description of Artificial Sequence: Synthetic polypeptide
  REGION 1..106: note = Amplimmune/GSK/MedImmune h3D10 Var9 VL

SEQ ID NO: 30113 - protein, 114 aa, synthetic construct; identical to SEQ ID NO: 4073
  REGION 1..114: note = Description of Artificial Sequence: Synthetic polypeptide
  REGION 1..114: note = Amplimmune/GSK/MedImmune h3D10 Var10 VH

SEQ ID NO: 30114 - protein, 106 aa, synthetic construct; identical to SEQ ID NO: 4069
  REGION 1..106: note = Description of Artificial Sequence: Synthetic polypeptide
  REGION 1..106: note = Amplimmune/GSK/MedImmune h3D10 Var10 VL

SEQ ID NO: 30115 - protein, 114 aa, synthetic construct; identical to SEQ ID NO: 4049
  REGION 1..114: note = Description of Artificial Sequence: Synthetic polypeptide
  REGION 1..114: note = Amplimmune/GSK/MedImmune h3D10 Var11 VH

SEQ ID NO: 30116 - protein, 106 aa, synthetic construct; identical to SEQ ID NO: 4013
  REGION 1..106: note = Description of Artificial Sequence: Synthetic polypeptide
  REGION 1..106: note = Amplimmune/GSK/MedImmune h3D10 Var11 VL

SEQ ID NO: 30117 - protein, 114 aa, synthetic construct; identical to SEQ ID NO: 4009
  REGION 1..114: note = Description of Artificial Sequence: Synthetic polypeptide
  REGION 1..114: note = Amplimmune/GSK/MedImmune h3D10 Var12 VH

SEQ ID NO: 30118 - protein, 106 aa, synthetic construct; identical to SEQ ID NO: 4053
  REGION 1..106: note = Description of Artificial Sequence: Synthetic polypeptide
  REGION 1..106: note = Amplimmune/GSK/MedImmune h3D10 Var12 VL

SEQ ID NO: 30119 - protein, 114 aa, synthetic construct; identical to SEQ ID NO: 4073
  REGION 1..114: note = Description of Artificial Sequence: Synthetic polypeptide
  REGION 1..114: note = Amplimmune/GSK/MedImmune h3D10 Var13 VH

SEQ ID NO: 30120 - protein, 106 aa, synthetic construct; identical to SEQ ID NO: 4029
  REGION 1..106: note = Description of Artificial Sequence: Synthetic polypeptide
  REGION 1..106: note = Amplimmune/GSK/MedImmune h3D10 Var13 VL

SEQ ID NO: 30121 - protein, 114 aa, synthetic construct; identical to SEQ ID NO: 4033
  REGION 1..114: note = Description of Artificial Sequence: Synthetic polypeptide
  REGION 1..114: note = Amplimmune/GSK/MedImmune h3D10 Var14 VH

SEQ ID NO: 30122 - protein, 106 aa, synthetic construct; identical to SEQ ID NO: 4069
  REGION 1..106: note = Description of Artificial Sequence: Synthetic polypeptide
  REGION 1..106: note = Amplimmune/GSK/MedImmune h3D10 Var14 VL

SEQ ID NO: 30123 - protein, 123 aa, synthetic construct; identical to SEQ ID NO: 4121
  REGION 1..123: note = Description of Artificial Sequence: Synthetic polypeptide
  REGION 1..123: note = Eli Lily Antibody A VH

SEQ ID NO: 30124 - protein, 111 aa, synthetic construct; identical to SEQ ID NO: 4125
  REGION 1..111: note = Description of Artificial Sequence: Synthetic polypeptide
  REGION 1..111: note = Eli Lily Antibody A VL

SEQ ID NO: 30125 - protein, 116 aa, synthetic construct; identical to SEQ ID NO: 4129
  REGION 1..116: note = Description of Artificial Sequence: Synthetic polypeptide
  REGION 1..116: note = Cytomyx C5H9v2 VH

SEQ ID NO: 30126 - protein, 108 aa, synthetic construct
  REGION 1..108: note = Description of Artificial Sequence: Synthetic polypeptide
  REGION 1..108: note = Cytomyx C5H9v2 VL
DIQMTQSPSSLSASVGDRVTITCRASQSISSYLNWYQQKPGKAPKLLIYAASSLQSGVPSRFSGSGSGTDFTLTISSLQPEDFATYYCQQDNGYPSTFGGGTKVEIKR

SEQ ID NO: 30127 - protein, 94 aa, synthetic construct
  REGION 1..94: note = Description of Artificial Sequence: Synthetic polypeptide
  REGION 1..94: note = Dana-Farber/Novartis Humanized 29E.2A3 VH
CKASGYTFTSYVMHWVKQAPGQRLEWIGYVNPFNDGTKYNEMFKGRATLTSDKSTSTAYMELSSLRSEDTAVYYCARQAWGYPWGQGTLVTVSS

SEQ ID NO: 30128 - protein, 111 aa, synthetic construct; identical to SEQ ID NO: 4141
  REGION 1..111: note = Description of Artificial Sequence: Synthetic polypeptide
  REGION 1..111: note = Dana-Farber/Novartis Humanized 29E.2A3 VL

SEQ ID NO: 30129 - protein, 121 aa, synthetic construct; identical to SEQ ID NO: 4145
  REGION 1..121: note = Description of Artificial Sequence: Synthetic polypeptide
  REGION 1..121: note = Dana-Farber/Novartis 1B9 VH

SEQ ID NO: 30130 - protein, 107 aa, synthetic construct; identical to SEQ ID NO: 4149
  REGION 1..107: note = Description of Artificial Sequence: Synthetic polypeptide
  REGION 1..107: note = Dana-Farber/Novartis 1B9 VL

SEQ ID NO: 30131 - protein, 121 aa, synthetic construct; identical to SEQ ID NO: 4153
  REGION 1..121: note = Description of Artificial Sequence: Synthetic polypeptide
  REGION 1..121: note = Dana-Farber/Novartis 4H1 VH

SEQ ID NO: 30132 - protein, 107 aa, synthetic construct; identical to SEQ ID NO: 4157
  REGION 1..107: note = Description of Artificial Sequence: Synthetic polypeptide
  REGION 1..107: note = Dana-Farber/Novartis 4H1 VL

SEQ ID NO: 30133 - protein, 120 aa, synthetic construct; identical to SEQ ID NO: 4161
  REGION 1..120: note = Description of Artificial Sequence: Synthetic polypeptide
  REGION 1..120: note = Dana-Farber/Novartis mAb-42 VH

SEQ ID NO: 30134 - protein, 112 aa, synthetic construct; identical to SEQ ID NO: 4165
  REGION 1..112: note = Description of Artificial Sequence: Synthetic polypeptide
  REGION 1..112: note = Dana-Farber/Novartis mAb-42 VL

SEQ ID NO: 30135 - protein, 120 aa, synthetic construct; identical to SEQ ID NO: 4169
  REGION 1..120: note = Description of Artificial Sequence: Synthetic polypeptide
  REGION 1..120: note = Dana-Farber/Novartis BAP058-03 VH

SEQ ID NO: 30136 - protein, 107 aa, synthetic construct; identical to SEQ ID NO: 4173
  REGION 1..107: note = Description of Artificial Sequence: Synthetic polypeptide
  REGION 1..107: note = Dana-Farber/Novartis BAP058-03 VL

SEQ ID NO: 30137 - protein, 120 aa, synthetic construct; identical to SEQ ID NO: 4177
  REGION 1..120: note = Description of Artificial Sequence: Synthetic polypeptide
  REGION 1..120: note = Dana-Farber/Novartis BAP058-04 VH

SEQ ID NO: 30138 - protein, 107 aa, synthetic construct; identical to SEQ ID NO: 4181
  REGION 1..107: note = Description of Artificial Sequence: Synthetic polypeptide
  REGION 1..107: note = Dana-Farber/Novartis BAP058-04 VL

SEQ ID NO: 30139 - protein, 120 aa, synthetic construct; identical to SEQ ID NO: 4185
  REGION 1..120: note = Description of Artificial Sequence: Synthetic polypeptide
  REGION 1..120: note = Dana-Farber/Novartis BAP058-06 VH

SEQ ID NO: 30140 - protein, 107 aa, synthetic construct; identical to SEQ ID NO: 4181
  REGION 1..107: note = Description of Artificial Sequence: Synthetic polypeptide
  REGION 1..107: note = Dana-Farber/Novartis BAP058-06 VL

SEQ ID NO: 30141 - protein, 120 aa, synthetic construct; identical to SEQ ID NO: 4193
  REGION 1..120: note = Description of Artificial Sequence: Synthetic polypeptide
  REGION 1..120: note = Dana-Farber/Novartis BAP058-07 VH

SEQ ID NO: 30142 - protein, 107 aa, synthetic construct; identical to SEQ ID NO: 4197
  REGION 1..107: note = Description of Artificial Sequence: Synthetic polypeptide
  REGION 1..107: note = Dana-Farber/Novartis BAP058-07 VL

SEQ ID NO: 30143 - protein, 120 aa, synthetic construct; identical to SEQ ID NO: 4169
  REGION 1..120: note = Description of Artificial Sequence: Synthetic polypeptide
  REGION 1..120: note = Dana-Farber/Novartis BAP058-11 VH

SEQ ID NO: 30144 - protein, 107 aa, synthetic construct; identical to SEQ ID NO: 4205
  REGION 1..107: note = Description of Artificial Sequence: Synthetic polypeptide
  REGION 1..107: note = Dana-Farber/Novartis BAP058-11 VL

SEQ ID NO: 30145 - protein, 120 aa, synthetic construct; identical to SEQ ID NO: 4209
  REGION 1..120: note = Description of Artificial Sequence: Synthetic polypeptide
  REGION 1..120: note = Dana-Farber/Novartis BAP058-13 VH

SEQ ID NO: 30146 - protein, 107 aa, synthetic construct; identical to SEQ ID NO: 4213
  REGION 1..107: note = Description of Artificial Sequence: Synthetic polypeptide
  REGION 1..107: note = Dana-Farber/Novartis BAP058-13 VL

SEQ ID NO: 30147 - protein, 121 aa, synthetic construct; identical to SEQ ID NO: 4217
  REGION 1..121: note = Description of Artificial Sequence: Synthetic polypeptide
  REGION 1..121: note = Sorrento H6 VH

SEQ ID NO: 30148 - protein, 108 aa, synthetic construct; identical to SEQ ID NO: 4221
  REGION 1..108: note = Description of Artificial Sequence: Synthetic polypeptide
  REGION 1..108: note = Sorrento H6 VL

SEQ ID NO: 30149 - protein, 121 aa, synthetic construct; identical to SEQ ID NO: 4225
  REGION 1..121: note = Description of Artificial Sequence: Synthetic polypeptide
  REGION 1..121: note = Sorrento RC5 VH

SEQ ID NO: 30150 - protein, 107 aa, synthetic construct; identical to SEQ ID NO: 4229
  REGION 1..107: note = Description of Artificial Sequence: Synthetic polypeptide
  REGION 1..107: note = Sorrento RC5 VL

SEQ ID NO: 30151 - protein, 123 aa, synthetic construct; identical to SEQ ID NO: 4233
  REGION 1..123: note = Description of Artificial Sequence: Synthetic polypeptide
  REGION 1..123: note = Sorrento SH1A1Q VH

SEQ ID NO: 30152 - protein, 110 aa, synthetic construct; identical to SEQ ID NO: 4237
  REGION 1..110: note = Description of Artificial Sequence: Synthetic polypeptide
  REGION 1..110: note = Sorrento SH1A1Q VL

SEQ ID NO: 30153 - protein, 118 aa, synthetic construct; identical to SEQ ID NO: 4241
  REGION 1..118: note = Description of Artificial Sequence: Synthetic polypeptide
  REGION 1..118: note = Sorrento SH1B3 VH

SEQ ID NO: 30154 - protein, 110 aa, synthetic construct; identical to SEQ ID NO: 4245
  REGION 1..110: note = Description of Artificial Sequence: Synthetic polypeptide
  REGION 1..110: note = Sorrento SH1B3 VL

SEQ ID NO: 30155 - protein, 118 aa, synthetic construct; identical to SEQ ID NO: 4249
  REGION 1..118: note = Description of Artificial Sequence: Synthetic polypeptide
  REGION 1..118: note = Sorrento SH1D1 VH

SEQ ID NO: 30156 - protein, 111 aa, synthetic construct; identical to SEQ ID NO: 4253
  REGION 1..111: note = Description of Artificial Sequence: Synthetic polypeptide
  REGION 1..111: note = Sorrento SH1D1 VL

SEQ ID NO: 30157 - protein, 118 aa, synthetic construct; identical to SEQ ID NO: 4241
  REGION 1..118: note = Description of Artificial Sequence: Synthetic polypeptide
  REGION 1..118: note = Sorrento SH1D2 VH

SEQ ID NO: 30158 - protein, 110 aa, synthetic construct; identical to SEQ ID NO: 4261
  REGION 1..110: note = Description of Artificial Sequence: Synthetic polypeptide
  REGION 1..110: note = Sorrento SH1D2 VL

SEQ ID NO: 30159 - protein, 118 aa, synthetic construct; identical to SEQ ID NO: 4249
  REGION 1..118: note = Description of Artificial Sequence: Synthetic polypeptide
  REGION 1..118: note = Sorrento SH1D12 VH

SEQ ID NO: 30160 - protein, 110 aa, synthetic construct; identical to SEQ ID NO: 4269
  REGION 1..110: note = Description of Artificial Sequence: Synthetic polypeptide
  REGION 1..110: note = Sorrento SH1D12 VL

SEQ ID NO: 30161 - protein, 118 aa, synthetic construct; identical to SEQ ID NO: 4249
  REGION 1..118: note = Description of Artificial Sequence: Synthetic polypeptide
  REGION 1..118: note = Sorrento SH1E1 VH

SEQ ID NO: 30162 - protein, 110 aa, synthetic construct; identical to SEQ ID NO: 4277
  REGION 1..110: note = Description of Artificial Sequence: Synthetic polypeptide
  REGION 1..110: note = Sorrento SH1E1 VL

SEQ ID NO: 30163 - protein, 118 aa, synthetic construct; identical to SEQ ID NO: 4241
  REGION 1..118: note = Description of Artificial Sequence: Synthetic polypeptide
  REGION 1..118: note = Sorrento SH1G9 VH

SEQ ID NO: 30164 - protein, 112 aa, synthetic construct; identical to SEQ ID NO: 4285
  REGION 1..112: note = Description of Artificial Sequence: Synthetic polypeptide
  REGION 1..112: note = Sorrento SH1G9 VL

SEQ ID NO: 30165 - protein, 120 aa, synthetic construct; identical to SEQ ID NO: 4289
  REGION 1..120: note = Description of Artificial Sequence: Synthetic polypeptide
  REGION 1..120: note = Sorrento SH1E6 VH

SEQ ID NO: 30166 - protein, 110 aa, synthetic construct; identical to SEQ ID NO: 4293
  REGION 1..110: note = Description of Artificial Sequence: Synthetic polypeptide
  REGION 1..110: note = Sorrento SH1E6 VL

SEQ ID NO: 30167 - protein, 118 aa, synthetic construct; identical to SEQ ID NO: 4297
  REGION 1..118: note = Description of Artificial Sequence: Synthetic polypeptide
  REGION 1..118: note = Sorrento SH1A2 VH

SEQ ID NO: 30168 - protein, 110 aa, synthetic construct; identical to SEQ ID NO: 4301
  REGION 1..110: note = Description of Artificial Sequence: Synthetic polypeptide
  REGION 1..110: note = Sorrento SH1A2 VL

SEQ ID NO: 30169 - protein, 118 aa, synthetic construct; identical to SEQ ID NO: 4305
  REGION 1..118: note = Description of Artificial Sequence: Synthetic polypeptide
  REGION 1..118: note = Sorrento SH1B1 VH

SEQ ID NO: 30170 - protein, 112 aa, synthetic construct; identical to SEQ ID NO: 4309
  REGION 1..112: note = Description of Artificial Sequence: Synthetic polypeptide
  REGION 1..112: note = Sorrento SH1B1 VL

SEQ ID NO: 30171 - protein, 121 aa, synthetic construct; identical to SEQ ID NO: 4313
  REGION 1..121: note = Description of Artificial Sequence: Synthetic polypeptide
  REGION 1..121: note = Sorrento H6B1L VH

SEQ ID NO: 30172 - protein, 108 aa, synthetic construct; identical to SEQ ID NO: 4317
  REGION 1..108: note = Description of Artificial Sequence: Synthetic polypeptide
  REGION 1..108: note = Sorrento H6B1L VL

SEQ ID NO: 30173 - protein, 121 aa, synthetic construct; identical to SEQ ID NO: 4321
  REGION 1..121: note = Description of Artificial Sequence: Synthetic polypeptide
  REGION 1..121: note = Sorrento H6A1 VH

SEQ ID NO: 30174 - protein, 108 aa, synthetic construct; identical to SEQ ID NO: 4221
  REGION 1..108: note = Description of Artificial Sequence: Synthetic polypeptide
  REGION 1..108: note = Sorrento H6A1 VL

SEQ ID NO: 30175 - protein, 121 aa, synthetic construct; identical to SEQ ID NO: 4313
  REGION 1..121: note = Description of Artificial Sequence: Synthetic polypeptide
  REGION 1..121: note = Sorrento H6B1 VH

SEQ ID NO: 30176 - protein, 108 aa, synthetic construct; identical to SEQ ID NO: 4221
  REGION 1..108: note = Description of Artificial Sequence: Synthetic polypeptide
  REGION 1..108: note = Sorrento H6B1 VL

SEQ ID NO: 30177 - protein, 121 aa, synthetic construct; identical to SEQ ID NO: 4337
  REGION 1..121: note = Description of Artificial Sequence: Synthetic polypeptide
  REGION 1..121: note = Sorrento H6B2 VH

SEQ ID NO: 30178 - protein, 108 aa, synthetic construct; identical to SEQ ID NO: 4221
  REGION 1..108: note = Description of Artificial Sequence: Synthetic polypeptide
  REGION 1..108: note = Sorrento H6B2 VL

SEQ ID NO: 30179 - protein, 118 aa, synthetic construct; identical to SEQ ID NO: 4345
  REGION 1..118: note = Description of Artificial Sequence: Synthetic polypeptide
  REGION 1..118: note = Sorrento G12 VH

SEQ ID NO: 30180 - protein, 107 aa, synthetic construct; identical to SEQ ID NO: 4349
  REGION 1..107: note = Description of Artificial Sequence: Synthetic polypeptide
  REGION 1..107: note = Sorrento G12 VL

SEQ ID NO: 30181 - protein, 118 aa, synthetic construct; identical to SEQ ID NO: 4353
  REGION 1..118: note = Description of Artificial Sequence: Synthetic polypeptide
  REGION 1..118: note = Sorrento RSA1 VH

SEQ ID NO: 30182 - protein, 108 aa, synthetic construct; identical to SEQ ID NO: 4357
  REGION 1..108: note = Description of Artificial Sequence: Synthetic polypeptide
  REGION 1..108: note = Sorrento RSA1 VL

SEQ ID NO: 30183 - protein, 120 aa, synthetic construct; identical to SEQ ID NO: 4361
  REGION 1..120: note = Description of Artificial Sequence: Synthetic polypeptide
  REGION 1..120: note = Sorrento RA3 VH

SEQ ID NO: 30184 - protein, 107 aa, synthetic construct; identical to SEQ ID NO: 4365
  REGION 1..107: note = Description of Artificial Sequence: Synthetic polypeptide
  REGION 1..107: note = Sorrento RA3 VL

SEQ ID NO: 30185 - protein, 119 aa, synthetic construct; identical to SEQ ID NO: 4369
  REGION 1..119: note = Description of Artificial Sequence: Synthetic polypeptide
  REGION 1..119: note = Sorrento SH1E2 VH

SEQ ID NO: 30186 - protein, 109 aa, synthetic construct; identical to SEQ ID NO: 4373
  REGION 1..109: note = Description of Artificial Sequence: Synthetic polypeptide
  REGION 1..109: note = Sorrento SH1E2 VL

SEQ ID NO: 30187 - protein, 120 aa, synthetic construct; identical to SEQ ID NO: 4289
  REGION 1..120: note = Description of Artificial Sequence: Synthetic polypeptide
  REGION 1..120: note = Sorrento SH1E4 VH

SEQ ID NO: 30188 - protein, 112 aa, synthetic construct; identical to SEQ ID NO: 4381
  REGION 1..112: note = Description of Artificial Sequence: Synthetic polypeptide
  REGION 1..112: note = Sorrento SH1E4 VL

SEQ ID NO: 30189 - protein, 121 aa, synthetic construct; identical to SEQ ID NO: 4385
  REGION 1..121: note = Description of Artificial Sequence: Synthetic polypeptide
  REGION 1..121: note = Sorrento SH1B11 VH

SEQ ID NO: 30190 - protein, 107 aa, synthetic construct; identical to SEQ ID NO: 4389
  REGION 1..107: note = Description of Artificial Sequence: Synthetic polypeptide
  REGION 1..107: note = Sorrento SH1B11 VL

SEQ ID NO: 30191 - protein, 119 aa, synthetic construct; identical to SEQ ID NO: 4393
  REGION 1..119: note = Description of Artificial Sequence: Synthetic polypeptide
  REGION 1..119: note = Sorrento SH1C8 VH

SEQ ID NO: 30192 - protein, 111 aa, synthetic construct; identical to SEQ ID NO: 4397
  REGION 1..111: note = Description of Artificial Sequence: Synthetic polypeptide
  REGION 1..111: note = Sorrento SH1C8 VL

SEQ ID NO: 30193 - protein, 123 aa, synthetic construct; identical to SEQ ID NO: 4401
  REGION 1..123: note = Description of Artificial Sequence: Synthetic polypeptide
  REGION 1..123: note = Regeneron H1H9364P2 VH

SEQ ID NO: 30194 - protein, 108 aa, synthetic construct; identical to SEQ ID NO: 4405
  REGION 1..108: note = Description of Artificial Sequence: Synthetic polypeptide
  REGION 1..108: note = Regeneron H1H9364P2 VL

SEQ ID NO: 30195 - protein, 120 aa, synthetic construct; identical to SEQ ID NO: 4409
  REGION 1..120: note = Description of Artificial Sequence: Synthetic polypeptide
  REGION 1..120: note = Regeneron H1H9373P2 VH

SEQ ID NO: 30196 - protein, 108 aa, synthetic construct; identical to SEQ ID NO: 4405
  REGION 1..108: note = Description of Artificial Sequence: Synthetic polypeptide
  REGION 1..108: note = Regeneron H1H9373P2 VL

SEQ ID NO: 30197 - protein, 120 aa, synthetic construct; identical to SEQ ID NO: 4417
  REGION 1..120: note = Description of Artificial Sequence: Synthetic polypeptide
  REGION 1..120: note = Regeneron H1H8314N VH

SEQ ID NO: 30198 - protein, 108 aa, synthetic construct; identical to SEQ ID NO: 4421
  REGION 1..108: note = Description of Artificial Sequence: Synthetic polypeptide
  REGION 1..108: note = Regeneron H1H8314N VL

SEQ ID NO: 30199 - protein, 119 aa, synthetic construct; identical to SEQ ID NO: 4425
  REGION 1..119: note = Description of Artificial Sequence: Synthetic polypeptide
  REGION 1..119: note = Inserm PDL1.3.1 VH

SEQ ID NO: 30200 - protein, 106 aa, synthetic construct; identical to SEQ ID NO: 4429
  REGION 1..106: note = Description of Artificial Sequence: Synthetic polypeptide
  REGION 1..106: note = Inserm PDL1.3.1 VL

SEQ ID NO: 30201 - protein, 118 aa, synthetic construct; identical to SEQ ID NO: 3737
  REGION 1..118: note = Description of Artificial Sequence: Synthetic polypeptide
  REGION 1..118: note = Medarex Ipilimumab VH

SEQ ID NO: 30202 - protein, 108 aa, synthetic construct; identical to SEQ ID NO: 3741
  REGION 1..108: note = Description of Artificial Sequence: Synthetic polypeptide
  REGION 1..108: note = Medarex Ipilimumab VL

SEQ ID NO: 30203 - protein, 125 aa, synthetic construct; identical to SEQ ID NO: 3745
  REGION 1..125: note = Description of Artificial Sequence: Synthetic polypeptide
  REGION 1..125: note = Amgen/MedImmune/Pfizer Tremelimumab VH

SEQ ID NO: 30204 - protein, 107 aa, synthetic construct; identical to SEQ ID NO: 3749
  REGION 1..107: note = Description of Artificial Sequence: Synthetic polypeptide
  REGION 1..107: note = Amgen/MedImmune/Pfizer Tremelimumab VL

SEQ ID NO: 30205 - protein, 118 aa, synthetic construct; identical to SEQ ID NO: 3753
  REGION 1..118: note = Description of Artificial Sequence: Synthetic polypeptide
  REGION 1..118: note = Agenus AGEN1884 VH

SEQ ID NO: 30206 - protein, 107 aa, synthetic construct; identical to SEQ ID NO: 3757
  REGION 1..107: note = Description of Artificial Sequence: Synthetic polypeptide
  REGION 1..107: note = Agenus AGEN1884 VL

SEQ ID NO: 30207 - protein, 116 aa, synthetic construct; identical to SEQ ID NO: 3761
  REGION 1..116: note = Description of Artificial Sequence: Synthetic polypeptide
  REGION 1..116: note = Tegenero 4.3F6B5 VH

SEQ ID NO: 30208 - protein, 107 aa, synthetic construct
  REGION 1..107: note = Description of Artificial Sequence: Synthetic polypeptide
  REGION 1..107: note = Tegenero 4.3F6B5 VL
DILMTQSPASLSASVGETVTITCGASENIYGALNWYQRKQGKSPQLLIYGATNLADGMSSRFSGSGLGRQYYLKISSLHPDDVATYFCQNILGTWTFGGGTKLEIKR

SEQ ID NO: 30209 - protein, 117 aa, synthetic construct; identical to SEQ ID NO: 3769
  REGION 1..117: note = Description of Artificial Sequence: Synthetic polypeptide
  REGION 1..117: note = Tegenero 4.8H10H5 VH

SEQ ID NO: 30210 - protein, 109 aa, synthetic construct
  REGION 1..109: note = Description of Artificial Sequence: Synthetic polypeptide
  REGION 1..109: note = Tegenero 4.8H10H5 VL
ENVLTQSPAIMSASPGERVTMTCSASSSVSYMHWYQQKSNTSPKLWIYDTSKLASGVPGRFSGSGSRNSYSLTISSMEAEDVATYYCFPGSGFPFMYTFGGGTKLEIKR

SEQ ID NO: 30211 - protein, 116 aa, synthetic construct; identical to SEQ ID NO: 3777
  REGION 1..116: note = Description of Artificial Sequence: Synthetic polypeptide
  REGION 1..116: note = Tegenero TGN2122.C VH

SEQ ID NO: 30212 - protein, 106 aa, synthetic construct; identical to SEQ ID NO: 3781
  REGION 1..106: note = Description of Artificial Sequence: Synthetic polypeptide
  REGION 1..106: note = Tegenero TGN2122.C VL

SEQ ID NO: 30213 - protein, 117 aa, synthetic construct; identical to SEQ ID NO: 3785
  REGION 1..117: note = Description of Artificial Sequence: Synthetic polypeptide
  REGION 1..117: note = Tegenero TGN2122.H VH

SEQ ID NO: 30214 - protein, 108 aa, synthetic construct; identical to SEQ ID NO: 3789
  REGION 1..108: note = Description of Artificial Sequence: Synthetic polypeptide
  REGION 1..108: note = Tegenero TGN2122.H VL

SEQ ID NO: 30215 - protein, 123 aa, synthetic construct; identical to SEQ ID NO: 3793
  REGION 1..123: note = Description of Artificial Sequence: Synthetic polypeptide
  REGION 1..123: note = Sorrento F7 VH

SEQ ID NO: 30216 - protein, 107 aa, synthetic construct; identical to SEQ ID NO: 3797
  REGION 1..107: note = Description of Artificial Sequence: Synthetic polypeptide
  REGION 1..107: note = Sorrento F7 VL

SEQ ID NO: 30217 - protein, 121 aa, synthetic construct; identical to SEQ ID NO: 3801
  REGION 1..121: note = Description of Artificial Sequence: Synthetic polypeptide
  REGION 1..121: note = Sorrento E8 VH

SEQ ID NO: 30218 - protein, 107 aa, synthetic construct; identical to SEQ ID NO: 3805
  REGION 1..107: note = Description of Artificial Sequence: Synthetic polypeptide
  REGION 1..107: note = Sorrento E8 VL

SEQ ID NO: 30219 - protein, 114 aa, synthetic construct; identical to SEQ ID NO: 3809
  REGION 1..114: note = Description of Artificial Sequence: Synthetic polypeptide
  REGION 1..114: note = Sorrento CT1E1 VH

SEQ ID NO: 30220 - protein, 108 aa, synthetic construct; identical to SEQ ID NO: 3813
  REGION 1..108: note = Description of Artificial Sequence: Synthetic polypeptide
  REGION 1..108: note = Sorrento CT1E1 VL

SEQ ID NO: 30221 - protein, 120 aa, synthetic construct; identical to SEQ ID NO: 3817
  REGION 1..120: note = Description of Artificial Sequence: Synthetic polypeptide
  REGION 1..120: note = Medarex BMS-986016 VH

SEQ ID NO: 30222 - protein, 107 aa, synthetic construct; identical to SEQ ID NO: 3821
  REGION 1..107: note = Description of Artificial Sequence: Synthetic polypeptide
  REGION 1..107: note = Medarex BMS-986016 VL

SEQ ID NO: 30223 - protein, 116 aa, synthetic construct; identical to SEQ ID NO: 3825
  REGION 1..116: note = Description of Artificial Sequence: Synthetic polypeptide
  REGION 1..116: note = Immutep/INSERM/Novartis IMP731 VH

SEQ ID NO: 30224 - protein, 113 aa, synthetic construct; identical to SEQ ID NO: 3829
  REGION 1..113: note = Description of Artificial Sequence: Synthetic polypeptide
  REGION 1..113: note = Immutep/INSERM/Novartis IMP731 VH

SEQ ID NO: 30225 - protein, 123 aa, synthetic construct; identical to SEQ ID NO: 3833
  REGION 1..123: note = Description of Artificial Sequence: Synthetic polypeptide
  REGION 1..123: note = Immutep/INSERM/Novartis 13E2 VH

SEQ ID NO: 30226 - protein, 107 aa, synthetic construct; identical to SEQ ID NO: 3837
  REGION 1..107: note = Description of Artificial Sequence: Synthetic polypeptide
  REGION 1..107: note = Immutep/INSERM/Novartis 13E2 VH

SEQ ID NO: 30227 - protein, 123 aa, synthetic construct; identical to SEQ ID NO: 3841
  REGION 1..123: note = Description of Artificial Sequence: Synthetic polypeptide
  REGION 1..123: note = Immutep/INSERM/Novartis 34F4 VH

SEQ ID NO: 30228 - protein, 107 aa, synthetic construct; identical to SEQ ID NO: 3845
  REGION 1..107: note = Description of Artificial Sequence: Synthetic polypeptide
  REGION 1..107: note = Immutep/INSERM/Novartis 34F4 VH

SEQ ID NO: 30229 - protein, 123 aa, synthetic construct; identical to SEQ ID NO: 3849
  REGION 1..123: note = Description of Artificial Sequence: Synthetic polypeptide
  REGION 1..123: note = Immutep/INSERM/Novartis IMP761 VH

SEQ ID NO: 30230 - protein, 107 aa, synthetic construct; identical to SEQ ID NO: 3853
  REGION 1..107: note = Description of Artificial Sequence: Synthetic polypeptide
  REGION 1..107: note = Immutep/INSERM/Novartis IMP761 VH

SEQ ID NO: 30231 - protein, 116 aa, synthetic construct; identical to SEQ ID NO: 3857
  REGION 1..116: note = Description of Artificial Sequence: Synthetic polypeptide
  REGION 1..116: note = GSK H5L7 VH

SEQ ID NO: 30232 - protein, 114 aa, synthetic construct
  REGION 1..114: note = Description of Artificial Sequence: Synthetic polypeptide
  REGION 1..114: note = GSK H5L7 VL
DIQMTQSPSSLSASVGDRVTITCKSSQSLLNPSNQKNYLAWYQQKPGKAPKLLVYFASTRDSGVPSRFSGSGSGTDFTLTISSLQPEDFATYYCLQHFGTPPTFGQGTKLEIKR

SEQ ID NO: 30233 - protein, 119 aa, synthetic construct; identical to SEQ ID NO: 3865
  REGION 1..119: note = Description of Artificial Sequence: Synthetic polypeptide
  REGION 1..119: note = Merck hu22D2 VH

SEQ ID NO: 30234 - protein, 111 aa, synthetic construct; identical to SEQ ID NO: 3869
  REGION 1..111: note = Description of Artificial Sequence: Synthetic polypeptide
  REGION 1..111: note = Merck hu22D2 VL

SEQ ID NO: 30235 - protein, 123 aa, synthetic construct; identical to SEQ ID NO: 3873
  REGION 1..123: note = Description of Artificial Sequence: Synthetic polypeptide
  REGION 1..123: note = Regeneron H4sH15482P VH

SEQ ID NO: 30236 - protein, 107 aa, synthetic construct; identical to SEQ ID NO: 3877
  REGION 1..107: note = Description of Artificial Sequence: Synthetic polypeptide
  REGION 1..107: note = Regeneron H4sH15482P VH

SEQ ID NO: 30237 - protein, 119 aa, synthetic construct; identical to SEQ ID NO: 3881
  REGION 1..119: note = Description of Artificial Sequence: Synthetic polypeptide
  REGION 1..119: note = Sorrento L35D4 VH

SEQ ID NO: 30238 - protein, 112 aa, synthetic construct; identical to SEQ ID NO: 3885
  REGION 1..112: note = Description of Artificial Sequence: Synthetic polypeptide
  REGION 1..112: note = Sorrento L35D4 VL

SEQ ID NO: 30239 - protein, 119 aa, synthetic construct; identical to SEQ ID NO: 3881
  REGION 1..119: note = Description of Artificial Sequence: Synthetic polypeptide
  REGION 1..119: note = Sorrento L35G6 VH

SEQ ID NO: 30240 - protein, 110 aa, synthetic construct; identical to SEQ ID NO: 3893
  REGION 1..110: note = Description of Artificial Sequence: Synthetic polypeptide
  REGION 1..110: note = Sorrento L35G6 VL

SEQ ID NO: 30241 - protein, 119 aa, synthetic construct; identical to SEQ ID NO: 3881
  REGION 1..119: note = Description of Artificial Sequence: Synthetic polypeptide
  REGION 1..119: note = Sorrento L33H11 VH

SEQ ID NO: 30242 - protein, 110 aa, synthetic construct; identical to SEQ ID NO: 3901
  REGION 1..110: note = Description of Artificial Sequence: Synthetic polypeptide
  REGION 1..110: note = Sorrento L33H11 VL

SEQ ID NO: 30243 - protein, 119 aa, synthetic construct; identical to SEQ ID NO: 3881
  REGION 1..119: note = Description of Artificial Sequence: Synthetic polypeptide
  REGION 1..119: note = Sorrento L32A9 VH

SEQ ID NO: 30244 - protein, 110 aa, synthetic construct; identical to SEQ ID NO: 3909
  REGION 1..110: note = Description of Artificial Sequence: Synthetic polypeptide
  REGION 1..110: note = Sorrento L32A9 VL

SEQ ID NO: 30245 - protein, 119 aa, synthetic construct; identical to SEQ ID NO: 3881
  REGION 1..119: note = Description of Artificial Sequence: Synthetic polypeptide
  REGION 1..119: note = Sorrento L32D10 VH

SEQ ID NO: 30246 - protein, 110 aa, synthetic construct; identical to SEQ ID NO: 3917
  REGION 1..110: note = Description of Artificial Sequence: Synthetic polypeptide
  REGION 1..110: note = Sorrento L32D10 VL

SEQ ID NO: 30247 - protein, 119 aa, synthetic construct; identical to SEQ ID NO: 3881
  REGION 1..119: note = Description of Artificial Sequence: Synthetic polypeptide
  REGION 1..119: note = Sorrento L32A4 VH

SEQ ID NO: 30248 - protein, 110 aa, synthetic construct; identical to SEQ ID NO: 3925
  REGION 1..110: note = Description of Artificial Sequence: Synthetic polypeptide
  REGION 1..110: note = Sorrento L32A4 VL

SEQ ID NO: 30249 - protein, 119 aa, synthetic construct; identical to SEQ ID NO: 3929
  REGION 1..119: note = Description of Artificial Sequence: Synthetic polypeptide
  REGION 1..119: note = Sorrento L3A1 VH

SEQ ID NO: 30250 - protein, 110 aa, synthetic construct; identical to SEQ ID NO: 3933
  REGION 1..110: note = Description of Artificial Sequence: Synthetic polypeptide
  REGION 1..110: note = Sorrento L3A1 VL

SEQ ID NO: 30251 - protein, 121 aa, synthetic construct; identical to SEQ ID NO: 3937
  REGION 1..121: note = Description of Artificial Sequence: Synthetic polypeptide
  REGION 1..121: note = Sorrento L3A10 VH

SEQ ID NO: 30252 - protein, 108 aa, synthetic construct; identical to SEQ ID NO: 3941
  REGION 1..108: note = Description of Artificial Sequence: Synthetic polypeptide
  REGION 1..108: note = Sorrento L3A10 VL

SEQ ID NO: 30253 - protein, 121 aa, synthetic construct; identical to SEQ ID NO: 3945
  REGION 1..121: note = Description of Artificial Sequence: Synthetic polypeptide
  REGION 1..121: note = Sorrento L3C5 VH

SEQ ID NO: 30254 - protein, 110 aa, synthetic construct; identical to SEQ ID NO: 3949
  REGION 1..110: note = Description of Artificial Sequence: Synthetic polypeptide
  REGION 1..110: note = Sorrento L3C5 VL

SEQ ID NO: 30255 - protein, 119 aa, synthetic construct; identical to SEQ ID NO: 3929
  REGION 1..119: note = Description of Artificial Sequence: Synthetic polypeptide
  REGION 1..119: note = Sorrento L3E3 VH

SEQ ID NO: 30256 - protein, 110 aa, synthetic construct; identical to SEQ ID NO: 3957
  REGION 1..110: note = Description of Artificial Sequence: Synthetic polypeptide
  REGION 1..110: note = Sorrento L3E3 VL

SEQ ID NO: 30257 - protein, 114 aa, synthetic construct
  REGION 1..114: note = Description of Artificial Sequence: Synthetic polypeptide
  REGION 1..114: note = AnaptysBio/Tesaro APE5137 VH
EVQLLESGGGLVQPGGSLRLSCAAASGFTFSSYDMSWVRQAPGKGLDWVSTISGGGTYTYYQDSVKGRFTISRDNSKNTLYLQMNSLRAEDTAVYYCASMDYWGQGTTVTVSSA

SEQ ID NO: 30258 - protein, 108 aa, synthetic construct
  REGION 1..108: note = Description of Artificial Sequence: Synthetic polypeptide
  REGION 1..108: note = AnaptysBio/Tesaro APE5137 VL
DIQMTQSPSSLSASVGDRVTITCRASQSIRRYLNWYHQKPGKAPKLLIYGASTLQSGVPSRFSGSGSGTDFTLTISSLQPEDFAVYYCQQSHSAPLTFGGGTKVEIKR

SEQ ID NO: 30259 - protein, 120 aa, synthetic construct
  REGION 1..120: note = Description of Artificial Sequence: Synthetic polypeptide
  REGION 1..120: note = AnaptysBio/Tesaro APE5121 VH
EVQVLESGGGLVQPGGSLRLYCVASGFTFSGSYAMSWVRQAPGKGLEWVSAISGSGGSTYYADSVKGRFTISRDNSKNTLYLQMNSLRAEDTAVYYCAKKYYVGPADYWGQGTLVTVSSG

SEQ ID NO: 30260 - protein, 113 aa, synthetic construct; identical to SEQ ID NO: 4597
  REGION 1..113: note = Description of Artificial Sequence: Synthetic polypeptide
  REGION 1..113: note = AnaptysBio/Tesaro APE5121 VL

SEQ ID NO: 30261 - protein, 118 aa, synthetic construct; identical to SEQ ID NO: 4601
  REGION 1..118: note = Description of Artificial Sequence: Synthetic polypeptide
  REGION 1..118: note = Dana-Farber/Novartis ABTIM3-hum03 VH

SEQ ID NO: 30262 - protein, 111 aa, synthetic construct; identical to SEQ ID NO: 4605
  REGION 1..111: note = Description of Artificial Sequence: Synthetic polypeptide
  REGION 1..111: note = Dana-Farber/Novartis ABTIM3-hum03 VL

SEQ ID NO: 30263 - protein, 118 aa, synthetic construct; identical to SEQ ID NO: 4609
  REGION 1..118: note = Description of Artificial Sequence: Synthetic polypeptide
  REGION 1..118: note = Dana-Farber/Novartis ABTIM3-hum11 VH

SEQ ID NO: 30264 - protein, 111 aa, synthetic construct; identical to SEQ ID NO: 4613
  REGION 1..111: note = Description of Artificial Sequence: Synthetic polypeptide
  REGION 1..111: note = Dana-Farber/Novartis ABTIM3-hum11 VL

SEQ ID NO: 30265 - protein, 118 aa, synthetic construct; identical to SEQ ID NO: 4601
  REGION 1..118: note = Description of Artificial Sequence: Synthetic polypeptide
  REGION 1..118: note = Dana-Farber/Novartis ABTIM3-hum21 VH

SEQ ID NO: 30266 - protein, 111 aa, synthetic construct; identical to SEQ ID NO: 4605
  REGION 1..111: note = Description of Artificial Sequence: Synthetic polypeptide
  REGION 1..111: note = Dana-Farber/Novartis ABTIM3-hum21 VL

SEQ ID NO: 30267 - protein, 121 aa, synthetic construct; identical to SEQ ID NO: 4625
  REGION 1..121: note = Description of Artificial Sequence: Synthetic polypeptide
  REGION 1..121: note = KHK 4177 VH

SEQ ID NO: 30268 - protein, 109 aa, synthetic construct; identical to SEQ ID NO: 4629
  REGION 1..109: note = Description of Artificial Sequence: Synthetic polypeptide
  REGION 1..109: note = KHK 4177 VL

SEQ ID NO: 30269 - protein, 121 aa, synthetic construct; identical to SEQ ID NO: 4633
  REGION 1..121: note = Description of Artificial Sequence: Synthetic polypeptide
  REGION 1..121: note = KHK 4545 VH

SEQ ID NO: 30270 - protein, 107 aa, synthetic construct; identical to SEQ ID NO: 4637
  REGION 1..107: note = Description of Artificial Sequence: Synthetic polypeptide
  REGION 1..107: note = KHK 4545 VL

SEQ ID NO: 30271 - protein, 117 aa, synthetic construct; identical to SEQ ID NO: 4641
  REGION 1..117: note = Description of Artificial Sequence: Synthetic polypeptide
  REGION 1..117: note = KHK 8123 VH

SEQ ID NO: 30272 - protein, 107 aa, synthetic construct; identical to SEQ ID NO: 4645
  REGION 1..107: note = Description of Artificial Sequence: Synthetic polypeptide
  REGION 1..107: note = KHK 8123 VL

SEQ ID NO: 30273 - protein, 117 aa, synthetic construct; identical to SEQ ID NO: 4649
  REGION 1..117: note = Description of Artificial Sequence: Synthetic polypeptide
  REGION 1..117: note = Jounce mAb15 VH

SEQ ID NO: 30274 - protein, 113 aa, synthetic construct; identical to SEQ ID NO: 4653
  REGION 1..113: note = Description of Artificial Sequence: Synthetic polypeptide
  REGION 1..113: note = Jounce mAb15 VL

SEQ ID NO: 30275 - protein, 121 aa, synthetic construct; identical to SEQ ID NO: 4657
  REGION 1..121: note = Description of Artificial Sequence: Synthetic polypeptide
  REGION 1..121: note = Jounce mAb58 VH

SEQ ID NO: 30276 - protein, 107 aa, synthetic construct; identical to SEQ ID NO: 4661
  REGION 1..107: note = Description of Artificial Sequence: Synthetic polypeptide
  REGION 1..107: note = Jounce mAb58 VL

SEQ ID NO: 30277 - protein, 120 aa, synthetic construct; identical to SEQ ID NO: 4665
  REGION 1..120: note = Description of Artificial Sequence: Synthetic polypeptide
  REGION 1..120: note = Roche TIM3-0433 VH

SEQ ID NO: 30278 - protein, 106 aa, synthetic construct; identical to SEQ ID NO: 4669
  REGION 1..106: note = Description of Artificial Sequence: Synthetic polypeptide
  REGION 1..106: note = Roche TIM3-0433 VH

SEQ ID NO: 30279 - protein, 120 aa, synthetic construct; identical to SEQ ID NO: 4665
  REGION 1..120: note = Description of Artificial Sequence: Synthetic polypeptide
  REGION 1..120: note = Roche TIM3-0434 VH

SEQ ID NO: 30280 - protein, 106 aa, synthetic construct; identical to SEQ ID NO: 4677
  REGION 1..106: note = Description of Artificial Sequence: Synthetic polypeptide
  REGION 1..106: note = Roche TIM3-0434 VH

SEQ ID NO: 30281 - protein, 119 aa, synthetic construct; identical to SEQ ID NO: 4681
  REGION 1..119: note = Description of Artificial Sequence: Synthetic polypeptide
  REGION 1..119: note = Roche TIM3-0438 VH

SEQ ID NO: 30282 - protein, 107 aa, synthetic construct; identical to SEQ ID NO: 4685
  REGION 1..107: note = Description of Artificial Sequence: Synthetic polypeptide
  REGION 1..107: note = Roche TIM3-0438 VH

SEQ ID NO: 30283 - protein, 119 aa, synthetic construct; identical to SEQ ID NO: 4689
  REGION 1..119: note = Description of Artificial Sequence: Synthetic polypeptide
  REGION 1..119: note = Roche TIM3-0443 VH

SEQ ID NO: 30284 - protein, 107 aa, synthetic construct; identical to SEQ ID NO: 4685
  REGION 1..107: note = Description of Artificial Sequence: Synthetic polypeptide
  REGION 1..107: note = Roche TIM3-0443 VH

SEQ ID NO: 30285 - protein, 120 aa, synthetic construct; identical to SEQ ID NO: 3705
  REGION 1..120: note = Description of Artificial Sequence: Synthetic polypeptide
  REGION 1..120: note = Medarex 3C2 VH

SEQ ID NO: 30286 - protein, 107 aa, synthetic construct [sequence omitted]

SEQ ID NO: 30287 - protein, 127 aa, synthetic construct; identical to SEQ ID NO: 3713
  REGION 1..127: note = Description of Artificial Sequence: Synthetic polypeptide
  REGION 1..127: note = Medarex 11E2 VH

SEQ ID NO: 30288 - protein, 107 aa, synthetic construct; identical to SEQ ID NO: 3717
  REGION 1..107: note = Description of Artificial Sequence: Synthetic polypeptide
  REGION 1..107: note = Medarex 11E2 VL

SEQ ID NO: 30289 - protein, 119 aa, synthetic construct; identical to SEQ ID NO: 3721
  REGION 1..119: note = Description of Artificial Sequence: Synthetic polypeptide
  REGION 1..119: note = Medarex 4C7 VH

SEQ ID NO: 30290 - protein, 108 aa, synthetic construct; identical to SEQ ID NO: 3725
  REGION 1..108: note = Description of Artificial Sequence: Synthetic polypeptide
  REGION 1..108: note = Medarex 4C7 VL

SEQ ID NO: 30291 - protein, 121 aa, synthetic construct; identical to SEQ ID NO: 3729
  REGION 1..121: note = Description of Artificial Sequence: Synthetic polypeptide
  REGION 1..121: note = Medarex 8D5 VH

SEQ ID NO: 30292 - protein, 108 aa, synthetic construct; identical to SEQ ID NO: 3733
  REGION 1..108: note = Description of Artificial Sequence: Synthetic polypeptide
  REGION 1..108: note = Medarex 8D5 VL

SEQ ID NO: 30293 - protein, 119 aa, synthetic construct; identical to SEQ ID NO: 4433
  REGION 1..119: note = Description of Artificial Sequence: Synthetic polypeptide
  REGION 1..119: note = Genentech 10A7 VH

SEQ ID NO: 30294 - protein, 113 aa, synthetic construct; identical to SEQ ID NO: 4437
  REGION 1..113: note = Description of Artificial Sequence: Synthetic polypeptide
  REGION 1..113: note = Genentech 10A7 VL

SEQ ID NO: 30295 - protein, 119 aa, synthetic construct; identical to SEQ ID NO: 4441
  REGION 1..119: note = Description of Artificial Sequence: Synthetic polypeptide
  REGION 1..119: note = Genentech 1F4 VH

SEQ ID NO: 30296 - protein, 112 aa, synthetic construct; identical to SEQ ID NO: 4445
  REGION 1..112: note = Description of Artificial Sequence: Synthetic polypeptide
  REGION 1..112: note = Genentech 1F4 VL

SEQ ID NO: 30297 - protein, 126 aa, synthetic construct; identical to SEQ ID NO: 4449
  REGION 1..126: note = Description of Artificial Sequence: Synthetic polypeptide
  REGION 1..126: note = Genentech 4.1D3 VH

SEQ ID NO: 30298 - protein, 113 aa, synthetic construct; identical to SEQ ID NO: 4453
  REGION 1..113: note = Description of Artificial Sequence: Synthetic polypeptide
  REGION 1..113: note = Genentech 4.1D3 VL

SEQ ID NO: 30299 - protein, 126 aa, synthetic construct; identical to SEQ ID NO: 4457
  REGION 1..126: note = Description of Artificial Sequence: Synthetic polypeptide
  REGION 1..126: note = Genentech 4.1D3.Q1E VH

SEQ ID NO: 30300 - protein, 113 aa, synthetic construct; identical to SEQ ID NO: 4453
  REGION 1..113: note = Description of Artificial Sequence: Synthetic polypeptide
  REGION 1..113: note = Genentech 4.1D3.Q1E VL

SEQ ID NO: 30301 - protein, 119 aa, synthetic construct; identical to SEQ ID NO: 4513
  REGION 1..119: note = Description of Artificial Sequence: Synthetic polypeptide
  REGION 1..119: note = Merck MEB125.31C6.A1.205 VH4/VL1 VH

SEQ ID NO: 30302 - protein, 107 aa, synthetic construct; identical to SEQ ID NO: 4517
  REGION 1..107: note = Description of Artificial Sequence: Synthetic polypeptide
  REGION 1..107: note = Merck MEB125.31C6.A1.205 VH4/VL1 VL

SEQ ID NO: 30303 - protein, 119 aa, synthetic construct; identical to SEQ ID NO: 4521
  REGION 1..119: note = Description of Artificial Sequence: Synthetic polypeptide
  REGION 1..119: note = Merck MEB125.31C6.A1.205 VH5/VL4 VH

SEQ ID NO: 30304 - protein, 107 aa, synthetic construct; identical to SEQ ID NO: 4525
  REGION 1..107: note = Description of Artificial Sequence: Synthetic polypeptide
  REGION 1..107: note = Merck MEB125.31C6.A1.205 VH5/VL4 VL

SEQ ID NO: 30305 - protein, 119 aa, synthetic construct; identical to SEQ ID NO: 4521
  REGION 1..119: note = Description of Artificial Sequence: Synthetic polypeptide
  REGION 1..119: note = Merck MEB125.31C6.A1.205 VH5/VL3 VH

SEQ ID NO: 30306 - protein, 107 aa, synthetic construct; identical to SEQ ID NO: 4533
  REGION 1..107: note = Description of Artificial Sequence: Synthetic polypeptide
  REGION 1..107: note = Merck MEB125.31C6.A1.205 VH5/VL3 VL

SEQ ID NO: 30307 - protein, 121 aa, synthetic construct; identical to SEQ ID NO: 4465
  REGION 1..121: note = Description of Artificial Sequence: Synthetic polypeptide
  REGION 1..121: note = Merck Hu14D7 VH1

SEQ ID NO: 30308 - protein, 121 aa, synthetic construct; identical to SEQ ID NO: 4469
  REGION 1..121: note = Description of Artificial Sequence: Synthetic polypeptide
  REGION 1..121: note = Merck Hu14D7 VH2

SEQ ID NO: 30309 - protein, 121 aa, synthetic construct; identical to SEQ ID NO: 4473
  REGION 1..121: note = Description of Artificial Sequence: Synthetic polypeptide
  REGION 1..121: note = Merck Hu14D7 VH3

SEQ ID NO: 30310 - protein, 108 aa, synthetic construct; identical to SEQ ID NO: 4477
  REGION 1..108: note = Description of Artificial Sequence: Synthetic polypeptide
  REGION 1..108: note = Merck Hu14D7 VL1

SEQ ID NO: 30311 - protein, 108 aa, synthetic construct; identical to SEQ ID NO: 4481
  REGION 1..108: note = Description of Artificial Sequence: Synthetic polypeptide
  REGION 1..108: note = Merck Hu14D7 VL2

SEQ ID NO: 30312 - protein, 108 aa, synthetic construct; identical to SEQ ID NO: 4485
  REGION 1..108: note = Description of Artificial Sequence: Synthetic polypeptide
  REGION 1..108: note = Merck Hu14D7 VL3

SEQ ID NO: 30313 - protein, 119 aa, synthetic construct; identical to SEQ ID NO: 4489
  REGION 1..119: note = Description of Artificial Sequence: Synthetic polypeptide
  REGION 1..119: note = Merck Hu26B10 VH1

SEQ ID NO: 30314 - protein, 119 aa, synthetic construct; identical to SEQ ID NO: 4493
  REGION 1..119: note = Description of Artificial Sequence: Synthetic polypeptide
  REGION 1..119: note = Merck Hu26B10 VH2

SEQ ID NO: 30315 - protein, 119 aa, synthetic construct; identical to SEQ ID NO: 4497
  REGION 1..119: note = Description of Artificial Sequence: Synthetic polypeptide
  REGION 1..119: note = Merck Hu26B10 VH3

SEQ ID NO: 30316 - protein, 107 aa, synthetic construct; identical to SEQ ID NO: 4501
  REGION 1..107: note = Description of Artificial Sequence: Synthetic polypeptide
  REGION 1..107: note = Merck Hu26B10 VL1

SEQ ID NO: 30317 - protein, 107 aa, synthetic construct; identical to SEQ ID NO: 4505
  REGION 1..107: note = Description of Artificial Sequence: Synthetic polypeptide
  REGION 1..107: note = Merck Hu26B10 VL2

SEQ ID NO: 30318 - protein, 107 aa, synthetic construct; identical to SEQ ID NO: 4509
  REGION 1..107: note = Description of Artificial Sequence: Synthetic polypeptide
  REGION 1..107: note = Merck Hu26B10 VL3

SEQ ID NO: 30319 - protein, 118 aa, synthetic construct; identical to SEQ ID NO: 4537
  REGION 1..118: note = Description of Artificial Sequence: Synthetic polypeptide
  REGION 1..118: note = BMS 15A6 VH

SEQ ID NO: 30320 - protein, 107 aa, synthetic construct; identical to SEQ ID NO: 4541
  REGION 1..107: note = Description of Artificial Sequence: Synthetic polypeptide
  REGION 1..107: note = BMS 15A6 VL

SEQ ID NO: 30321 - protein, 130 aa, synthetic construct; identical to SEQ ID NO: 4545
  REGION 1..130: note = Description of Artificial Sequence: Synthetic polypeptide
  REGION 1..130: note = BMS 22G2 VH

SEQ ID NO: 30322 - protein, 109 aa, synthetic construct; identical to SEQ ID NO: 4549
  REGION 1..109: note = Description of Artificial Sequence: Synthetic polypeptide
  REGION 1..109: note = BMS 22G2 VL

SEQ ID NO: 30323 - protein, 126 aa, synthetic construct; identical to SEQ ID NO: 4553
  REGION 1..126: note = Description of Artificial Sequence: Synthetic polypeptide
  REGION 1..126: note = BMS 11G11 VH

SEQ ID NO: 30324 - protein, 106 aa, synthetic construct; identical to SEQ ID NO: 4557
  REGION 1..106: note = Description of Artificial Sequence: Synthetic polypeptide
  REGION 1..106: note = BMS 11G11 VL

SEQ ID NO: 30325 - protein, 128 aa, synthetic construct; identical to SEQ ID NO: 4561
  REGION 1..128: note = Description of Artificial Sequence: Synthetic polypeptide
  REGION 1..128: note = BMS 10D7 VH

SEQ ID NO: 30326 - protein, 107 aa, synthetic construct; identical to SEQ ID NO: 4565
  REGION 1..107: note = Description of Artificial Sequence: Synthetic polypeptide
  REGION 1..107: note = BMS 10D7 VL

SEQ ID NO: 30327 - protein, 116 aa, synthetic construct; identical to SEQ ID NO: 4569
  REGION 1..116: note = Description of Artificial Sequence: Synthetic polypeptide
  REGION 1..116: note = Oncomed 313R19 VH

SEQ ID NO: 30328 - protein, 111 aa, synthetic construct
  REGION 1..111: note = Description of Artificial Sequence: Synthetic polypeptide
  REGION 1..111: note = Oncomed 313R19 VL
DIQMTQSPSSLSASVGDRVTITCQASQNIYSDLAWYQQKPGKAPKLLIYRASTLASGVPSRFSGSGSGTDFTLTISSLQPEDFATYYCQQEHLVAWIYNVFGQGTKVEIKR

SEQ ID NO: 30329 - protein, 118 aa, synthetic construct; identical to SEQ ID NO: 4577
  REGION 1..118: note = Description of Artificial Sequence: Synthetic polypeptide
  REGION 1..118: note = Oncomed 313M32 VH

SEQ ID NO: 30330 - protein, 99 aa, synthetic construct; identical to SEQ ID NO: 4581
  REGION 1..99: note = Description of Artificial Sequence: Synthetic polypeptide
  REGION 1..99: note = Oncomed 313M32 VL

SEQ ID NO: 30331 - protein, 118 aa, synthetic construct; identical to SEQ ID NO: 25612
  REGION 1..118: note = Description of Artificial Sequence: Synthetic polypeptide
  REGION 1..118: note = VH of XENP20269

SEQ ID NO: 30332 - protein, 5 aa, synthetic construct
  REGION 1..5: note = Description of Artificial Sequence: Synthetic peptide
  REGION 1..5: note = XENP20269 vhCDR1
GYGVN

SEQ ID NO: 30333 - protein, 16 aa, synthetic construct
  REGION 1..16: note = Description of Artificial Sequence: Synthetic peptide
  REGION 1..16: note = XENP20269 vhCDR2
MIWIDGSTDYNSALKS

SEQ ID NO: 30334 - protein, 10 aa, synthetic construct
  REGION 1..10: note = Description of Artificial Sequence: Synthetic peptide
  REGION 1..10: note = XENP20269 vhCDR3
DRPDGRAMDY

SEQ ID NO: 30335 - protein, 106 aa, synthetic construct; identical to SEQ ID NO: 25617
  REGION 1..106: note = Description of Artificial Sequence: Synthetic polypeptide
  REGION 1..106: note = VL of XENP20269

SEQ ID NO: 30336 - protein, 11 aa, synthetic construct
  REGION 1..11: note = Description of Artificial Sequence: Synthetic peptide
  REGION 1..11: note = XENP20269 vlCDR1
KASQSVSNDVA

SEQ ID NO: 30337 - protein, 7 aa, synthetic construct
  REGION 1..7: note = Description of Artificial Sequence: Synthetic peptide
  REGION 1..7: note = XENP20269 vlCDR2
YASNRYT

SEQ ID NO: 30338 - protein, 8 aa, synthetic construct
  REGION 1..8: note = Description of Artificial Sequence: Synthetic peptide
  REGION 1..8: note = XENP20269 vlCDR3
QQDYSSPT

SEQ ID NO: 30339 - protein, 118 aa, synthetic construct; identical to SEQ ID NO: 3146
  REGION 1..118: note = Description of Artificial Sequence: Synthetic polypeptide
  REGION 1..118: note = VH of XENP20872

SEQ ID NO: 30340 - protein, 5 aa, synthetic construct
  REGION 1..5: note = Description of Artificial Sequence: Synthetic peptide
  REGION 1..5: note = XENP20872 vhCDR1
GYGVN

SEQ ID NO: 30341 - protein, 16 aa, synthetic construct
  REGION 1..16: note = Description of Artificial Sequence: Synthetic peptide
  REGION 1..16: note = XENP20872 vhCDR2
MIWIDGSTDYNSKFQG

SEQ ID NO: 30342 - protein, 10 aa, synthetic construct
  REGION 1..10: note = Description of Artificial Sequence: Synthetic peptide
  REGION 1..10: note = XENP20872 vhCDR3
DRPDGRAMDY

SEQ ID NO: 30343 - protein, 106 aa, synthetic construct; identical to SEQ ID NO: 3161
  REGION 1..106: note = Description of Artificial Sequence: Synthetic polypeptide
  REGION 1..106: note = VL of XENP20872

SEQ ID NO: 30344 - protein, 11 aa, synthetic construct
  REGION 1..11: note = Description of Artificial Sequence: Synthetic peptide
  REGION 1..11: note = XENP20872 vlCDR1
KASQSVSNDVA

SEQ ID NO: 30345 - protein, 7 aa, synthetic construct
  REGION 1..7: note = Description of Artificial Sequence: Synthetic peptide
  REGION 1..7: note = XENP20872 vlCDR2
YASNRYT

SEQ ID NO: 30346 - protein, 8 aa, synthetic construct
  REGION 1..8: note = Description of Artificial Sequence: Synthetic peptide
  REGION 1..8: note = XENP20872 vlCDR3
QQDYSSPT

SEQ ID NO: 30347 - protein, 118 aa, synthetic construct; identical to SEQ ID NO: 25981
  REGION 1..118: note = Description of Artificial Sequence: Synthetic polypeptide
  REGION 1..118: note = VH of XENP020882

SEQ ID NO: 30348 - protein, 5 aa, synthetic construct
  REGION 1..5: note = Description of Artificial Sequence: Synthetic peptide
  REGION 1..5: note = XENP020882 vhCDR1
GYGVN

SEQ ID NO: 30349 - protein, 16 aa, synthetic construct
  REGION 1..16: note = Description of Artificial Sequence: Synthetic peptide
  REGION 1..16: note = XENP020882 vhCDR2
MIWIDGSTDYNSKFQG

SEQ ID NO: 30350 - protein, 10 aa, synthetic construct
  REGION 1..10: note = Description of Artificial Sequence: Synthetic peptide
  REGION 1..10: note = XENP020882 vhCDR3
DRPDGRAMDY

SEQ ID NO: 30351 - protein, 106 aa, synthetic construct; identical to SEQ ID NO: 3161
  REGION 1..106: note = Description of Artificial Sequence: Synthetic polypeptide
  REGION 1..106: note = VL of XENP020882

SEQ ID NO: 30352 - protein, 11 aa, synthetic construct
  REGION 1..11: note = Description of Artificial Sequence: Synthetic peptide
  REGION 1..11: note = XENP020882 vlCDR1
KASQSVSNDVA

SEQ ID NO: 30353 - protein, 7 aa, synthetic construct
  REGION 1..7: note = Description of Artificial Sequence: Synthetic peptide
  REGION 1..7: note = XENP020882 vlCDR2
YASNRYT

SEQ ID NO: 30354 - protein, 8 aa, synthetic construct
  REGION 1..8: note = Description of Artificial Sequence: Synthetic peptide
  REGION 1..8: note = XENP020882 vlCDR3
QQDYSSPT

SEQ ID NO: 30355 - protein, 454 aa, synthetic construct; identical to SEQ ID NO: 26362
  REGION 1..454: note = Description of Artificial Sequence: Synthetic polypeptide
  REGION 1..454: note = XENP022917 [ICOS]_H0_L0.38_Fab-1G6_L1.194_H1.279 Fab-Fc Heavy Chain

SEQ ID NO: 30356 - protein, 480 aa, synthetic construct; identical to SEQ ID NO: 2930
  REGION 1..480: note = Description of Artificial Sequence: Synthetic polypeptide
  REGION 1..480: note = XENP022917 [ICOS]_H0_L0.38_Fab-1G6_L1.194_H1.279 scFv-Fc Heavy Chain

SEQ ID NO: 30357 - protein, 214 aa, synthetic construct; identical to SEQ ID NO: 26557
  REGION 1..214: note = Description of Artificial Sequence: Synthetic polypeptide
  REGION 1..214: note = XENP022917 [ICOS]_H0_L0.38_Fab-1G6_L1.194_H1.279 Light Chain

SEQ ID NO: 30358 - protein, 454 aa, synthetic construct; identical to SEQ ID NO: 26362
  REGION 1..454: note = Description of Artificial Sequence: Synthetic polypeptide
  REGION 1..454: note = XENP022977 [ICOS]_H0_L0.37_Fab-1G6_L1.194_H1.279 Fab-Fc Heavy Chain

SEQ ID NO: 30359 - protein, 480 aa, synthetic construct; identical to SEQ ID NO: 2930
  REGION 1..480: note = Description of Artificial Sequence: Synthetic polypeptide
  REGION 1..480: note = XENP022977 [ICOS]_H0_L0.37_Fab-1G6_L1.194_H1.279 scFv-Fc Heavy Chain

SEQ ID NO: 30360 - protein, 214 aa, synthetic construct; identical to SEQ ID NO: 26537
  REGION 1..214: note = Description of Artificial Sequence: Synthetic polypeptide
  REGION 1..214: note = XENP022977 [ICOS]_H0_L0.37_Fab-1G6_L1.194_H1.279 Light Chain

SEQ ID NO: 30361 - protein, 454 aa, synthetic construct; identical to SEQ ID NO: 26642
  REGION 1..454: note = Description of Artificial Sequence: Synthetic polypeptide
  REGION 1..454: note XENP024901[ICOS]_H0.66_L0_Fab_IgG1_PVA_/S267K_pI(-)_Isoster ic _A_L368D/K370S/M428L/N434S Fab-Fc Heavy Chain

SEQ ID NO: 30362 - protein, 231 aa, synthetic construct; identical to SEQ ID NO: 2409
  REGION 1..231: note = Description of Artificial Sequence: Synthetic polypeptide
  REGION 1..231: note = XENP024901 empty_Fc(216)_IgG1_C220S/S364K/E357Q/M428L/N434S empty-Fc Heavy Chain

SEQ ID NO: 30363 - protein, 214 aa, synthetic construct; identical to SEQ ID NO: 26297
  REGION 1..214: note = Description of Artificial Sequence: Synthetic polypeptide
  REGION 1..214: note = XENP024901[ICOS]_ L0 Light Chain

SEQ ID NO: 30364 - protein, 452 aa, synthetic construct
  REGION 1..452: note = Description of Artificial Sequence: Synthetic polypeptide
  REGION 1..452: note = XENP016470 huPD-L1_Fc(216)_huIgG1-mIgG2aa_Hinge(KasI)_mIgG2aa _CH2_CH3
FTVTVPKDLYVVEYGSNMTIECKFPVEKQLDLAALIVYWEMEDKNIIQFVHGEEDLKVQHSSYRQRARLLKDQLSLGNAALQITDVKLQDAGVYRCMISYGGADYKRITVKVNAPYNKINQRILVVDPVTSEHELTCQAEGYPKAEVIWTSSDHQVLSGKTTTTNSKREEKLFNVTSTLRINTTTNEIFYCTFRRLDPEENHTAELVIPELPLAHPPNEREPKSSDKTHTCPPCPAPNLLGGPSVFIFPPKIKDVLMISLSPMVTCVVVDVSEDDPDVQISWFVNNVEVLTAQTQTHREDYNSTLRVVSALPIQHQDWMSGKEFKCKVNNKALPAPIERTISKPKGSVRAPQVYVLPPPEEEMTKKQVTLTCMVTDFMPEDIYVEWTNNGKTELNYKNTEPVLDSDGSYFMYSKLRVEKKNWVERNSYSCSVVHEGLHNHHTTKSFSRTPGK

SEQ ID NO: 30365 - protein, 433 aa, synthetic construct
  REGION 1..433: note = Description of Artificial Sequence: Synthetic polypeptide
  REGION 1..433: note = XENP017869 huPD-L2_Fc(216)_huIgG1-mIgG2aa_Hinge(KasI)_mIgG2aa _CH2_CH3
LFTVTVPKELYIIEHGSNVTLECNFDTGSHVNLGAITASLQKVENDTSPHRERATLLEEQLPLGKASFHIPQVQVRDEGQYQCIIIYGVAWDYKYLTLKVKASYRKINTHILKVPETDEVELTCQATGYPLAEVSWPNVSVPANTSHSRTPEGLYQVTSVLRLKPPPGRNFSCVFWNTHVRELTLASIDLQSQMEPRTHPTEPKSSDKTHTCPPCPAPNLLGGPSVFIFPPKIKDVLMISLSPMVTCVVVDVSEDDPDVQISWFVNNVEVLTAQTQTHREDYNSTLRVVSALPIQHQDWMSGKEFKCKVNNKALPAPIERTISKPKGSVRAPQVYVLPPPEEEMTKKQVTLTCMVTDFMPEDIYVEWTNNGKTELNYKNTEPVLDSDGSYFMYSKLRVEKKNWVERNSYSCSVVHEGLHNHHTTKSFSRTPGK

SEQ ID NO: 30366 - protein, 469 aa, synthetic construct
  REGION 1..469: note = Description of Artificial Sequence: Synthetic polypeptide
  REGION 1..469: note = XENP023642 huICOSL_Fc(216)_IgG1_C220S/PVA_/S267K
DTQEKEVRAMVGSDVELSCACPEGSRFDLNDVYVYWQTSESKTVVTYHIPQNSSLENVDSRYRNRALMSPAGMLRGDFSLRLFNVTPQDEQKFHCLVLSQSLGFQEVLSVEVTLHVAANFSVPVVSAPHSPSQDELTFTCTSINGYPRPNVYWINKTDNSLLDQALQNDTVFLNMRGLYDVVSVLRIARTPSVNIGCCIENVLLQQNLTVGSQTGNDIGERDKITENPVSTGEKNAATEPKSSDKTHTCPPCPAPPVAGPSVFLFPPKPKDTLMISRTPEVTCVVVDVKHEDPEVKFNWYVDGVEVHNAKTKPREEQYNSTYRVVSVLTVLHQDWLNGKEYKCKVSNKALPAPIEKTISKAKGQPREPQVYTLPPSREEMTKNQVSLTCLVKGFYPSDIAVEWESNGQPENNYKTTPPVLDSDGSFFLYSKLTVDKSRWQQGNVFSCSVMHEALHNHYTQKSLSLSPGK

SEQ ID NO: 30367 - protein, 231 aa, synthetic construct
  REGION 1..231: note = Description of Artificial Sequence: Synthetic polypeptide
  REGION 1..231: note = XENP021622 empty-Fc(216)_pI(-)_Isosteric_A_C220S/PVA_/S267K/ L368D/K370S/M428L/N434S empty-Fc Heavy Chain
EPKSSDKTHTCPPCPAPPVAGPSVFLFPPKPKDTLMISRTPEVTCVVVDVKHEDPEVKFNWYVDGVEVHNAKTKPREEEYNSTYRVVSVLTVLHQDWLNGKEYKCKVSNKALPAPIEKTISKAKGQPREPQVYTLPPSREEMTKNQVSLTCDVSGFYPSDIAVEWESDGQPENNYKTTPPVLDSDGSFFLYSKLTVDKSRWEQGDVFSCSVLHEALHSHYTQKSLSLSPGK

SEQ ID NO: 30368 - protein, 480 aa, synthetic construct; identical to SEQ ID NO: 2930
  REGION 1..480: note = Description of Artificial Sequence: Synthetic polypeptide
  REGION 1..480: note = XENP021622 1G6_L1.194_H1.279_scFv(GKPGS)4_IgG1_C220S/PVA_/S267K /S364K/E357Q/M428L/N434S scFv-Fc Heavy Chain

SEQ ID NO: 30369 - protein, 447 aa, synthetic construct
  REGION 1..447: note = Description of Artificial Sequence: Synthetic polypeptide
  REGION 1..447: note = XENP016433 Ipilimumab_H0L0_IgG1_PVA_/S267K Heavy Chain
QVQLVESGGGVVQPGRSLRLSCAASGFTFSSYTMHWVRQAPGKGLEWVTFISYDGNNKYYADSVKGRFTISRDNSKNTLYLQMNSLRAEDTAIYYCARTGWLGPFDYWGQGTLVTVSSASTKGPSVFPLAPSSKSTSGGTAALGCLVKDYFPEPVTVSWNSGALTSGVHTFPAVLQSSGLYSLSSVVTVPSSSLGTQTYICNVNHKPSNTKVDKKVEPKSCDKTHTCPPCPAPPVAGPSVFLFPPKPKDTLMISRTPEVTCVVVDVKHEDPEVKFNWYVDGVEVHNAKTKPREEQYNSTYRVVSVLTVLHQDWLNGKEYKCKVSNKALPAPIEKTISKAKGQPREPQVYTLPPSREEMTKNQVSLTCLVKGFYPSDIAVEWESNGQPENNYKTTPPVLDSDGSFFLYSKLTVDKSRWQQGNVFSCSVMHEALHNHYTQKSLSLSPGK

SEQ ID NO: 30370 - protein, 215 aa, synthetic construct; identical to SEQ ID NO: 7600
  REGION 1..215: note = Description of Artificial Sequence: Synthetic polypeptide
  REGION 1..215: note = XENP016433 Ipilimumab_H0L0_IgG1_PVA_/S267K Light Chain

SEQ ID NO: 30371 - protein, 447 aa, synthetic construct
  REGION 1..447: note = Description of Artificial Sequence: Synthetic polypeptide
  REGION 1..447: note = XENP020053 [alphaCTLA-4]_H3L0.22-1G6_L1.194_H1.279 Fab-Fc Heavy Chain
EVQLVESGGGLVKPGGSLRLSCAASGFTFSSYTMHWVRQAPGKGLEWVSFISYDGNNKYYADSVKGRFTISRDNAKNSLYLQMNSLRAEDTAVYYCARTGWLGPFDYWGQGTLVTVSSASTKGPSVFPLAPSSKSTSGGTAALGCLVKDYFPEPVTVSWNSGALTSGVHTFPAVLQSSGLYSLSSVVTVPSSSLGTQTYICNVNHKPSDTKVDKKVEPKSCDKTHTCPPCPAPPVAGPSVFLFPPKPKDTLMISRTPEVTCVVVDVKHEDPEVKFNWYVDGVEVHNAKTKPREEEYNSTYRVVSVLTVLHQDWLNGKEYKCKVSNKALPAPIEKTISKAKGQPREPQVYTLPPSREEMTKNQVSLTCDVSGFYPSDIAVEWESDGQPENNYKTTPPVLDSDGSFFLYSKLTVDKSRWEQGDVFSCSVMHEALHNHYTQKSLSLSPGK

SEQ ID NO: 30372 - protein, 480 aa, synthetic construct; identical to SEQ ID NO: 2870
  REGION 1..480: note = Description of Artificial Sequence: Synthetic polypeptide
  REGION 1..480: note = XENP020053 [alphaCTLA-4]_H3L0.22-1G6_L1.194_H1.279 scFv-Fc Heavy Chain

SEQ ID NO: 30373 - protein, 215 aa, synthetic construct; identical to SEQ ID NO: 2410
  REGION 1..215: note = Description of Artificial Sequence: Synthetic polypeptide
  REGION 1..215: note = XENP020053 [alphaCTLA-4]_H3L0.22-1G6_L1.194_H1.279 Light Chain

SEQ ID NO: 30374 - protein, 447 aa, synthetic construct; identical to SEQ ID NO: 27506
  REGION 1..447: note = Description of Artificial Sequence: Synthetic polypeptide
  REGION 1..447: note = XENP29154_TGN1412_hu5.11A1[CD28]_H1_IgG4_K447del Heavy Chain

SEQ ID NO: 30375 - protein, 214 aa, synthetic construct; identical to SEQ ID NO: 27132
  REGION 1..214: note = Description of Artificial Sequence: Synthetic polypeptide
  REGION 1..214: note = XENP29154 TGN1412_hu5.11A1[CD28]_ L1 Light Chain

SEQ ID NO: 30376 - protein, 447 aa, synthetic construct
  REGION 1..447: note = Description of Artificial Sequence: Synthetic polypeptide
  REGION 1..447: note = XENP23058 Jounce_37A10S713_[ICOS]_H0L0_IgG1_WT Heavy Chain
EVQLVESGGGLVQPGGSLRLSCAASGFTFSDYWMDWVRQAPGKGLVWVSNIDEDGSITEYSPFVKGRFTISRDNAKNTLYLQMNSLRAEDTAVYYCTRWGRFGFDSWGQGTLVTVSSASTKGPSVFPLAPSSKSTSGGTAALGCLVKDYFPEPVTVSWNSGALTSGVHTFPAVLQSSGLYSLSSVVTVPSSSLGTQTYICNVNHKPSNTKVDKKVEPKSCDKTHTCPPCPAPELLGGPSVFLFPPKPKDTLMISRTPEVTCVVVDVSHEDPEVKFNWYVDGVEVHNAKTKPREEQYNSTYRVVSVLTVLHQDWLNGKEYKCKVSNKALPAPIEKTISKAKGQPREPQVYTLPPSREEMTKNQVSLTCLVKGFYPSDIAVEWESNGQPENNYKTTPPVLDSDGSFFLYSKLTVDKSRWQQGNVFSCSVMHEALHNHYTQKSLSLSPGK

SEQ ID NO: 30377 - protein, 218 aa, synthetic construct; identical to SEQ ID NO: 26357
  REGION 1..218: note = Description of Artificial Sequence: Synthetic polypeptide
  REGION 1..218: note = XENP23058 Jounce_37A10S713_[ICOS]_H0L0_IgG1_WT Light Chain

SEQ ID NO: 30378 - protein, 446 aa, synthetic construct; identical to SEQ ID NO: 26352
  REGION 1..446: note = Description of Artificial Sequence: Synthetic polypeptide
  REGION 1..446: note = XENP23057 Jounce_37A10S713_[ICOS]_H0L0_IgG1_PVA_/S267K Heavy Chain

SEQ ID NO: 30379 - protein, 218 aa, synthetic construct; identical to SEQ ID NO: 26357
  REGION 1..218: note = Description of Artificial Sequence: Synthetic polypeptide
  REGION 1..218: note = XENP23057 Jounce_37A10S713_[ICOS]_H0L0_IgG1_PVA_/S267K Light Chain

SEQ ID NO: 30380 - protein, 4 aa, synthetic construct
  REGION 1..4: note = Description of Artificial Sequence: Synthetic peptide
ASTK

SEQ ID NO: 30381 - protein, 4 aa, synthetic construct
  REGION 1..4: note = Description of Artificial Sequence: Synthetic peptide
RTVA

SEQ ID NO: 30382 - protein, 5 aa, synthetic construct
  REGION 1..5: note = Description of Artificial Sequence: Synthetic peptide
GSGGS

SEQ ID NO: 30383 - protein, 5 aa, synthetic construct
  REGION 1..5: note = Description of Artificial Sequence: Synthetic peptide
GGGGS

SEQ ID NO: 30384 - protein, 4 aa, synthetic construct
  REGION 1..4: note = Description of Artificial Sequence: Synthetic peptide
GGGS

SEQ ID NO: 30385 - protein, 249 aa, synthetic construct; identical to SEQ ID NO: 16069
  REGION 1..249: note = Description of Artificial Sequence: Synthetic polypeptide
  REGION 1..249: note = XENP023104 scFv chain
